United States Patent Application Publication US 2023/0390346 A1 - sequence listing, part 8

SEQ ID NO: 10 - DNA, 4084681 bp, Bacillus amyloliquefaciens (residues 2,042,342-4,084,681 of 4,084,681)
aagagcttgttttccgactttcagcccttgttcggcccgtttttggttgacgaatatccacgcgtaaatttctttaatgttgcgtttcatttcttccatacccactaatgtgttcatttctttttcaatttctttcagaatgctgtgcttggcttcatttttttgcagggcggcctgatattccgcctcagcttctgcatttgtcagcacttgcttttggccattaagaatgatgttaatttgtccgttatttttataggttacagcgcgctccaacatgctcacctctctgttctctctttatcttactcatgatgaagcggttctgtgacatccgcctatcatcatgaggcccgttttcctctttatctgtcactttttccgttctcttcgggaatgatgttgaatcctgcgctttcccgagaaatatttttcatttcttattgtattcagcaaaaacgggaggacaaaccatttatttttattttccgggaaatgttgggtgtatttctcatttttttcatgaatgacagccgtacaagcaccttttgaatatcatcatatgctgtaatgaggtgatggagaatggttaaaatttttatagaccccggtcatggcggaactgattcaggtgcaaccggaaacggacttcaggaaaaagcggtcacgctggagatcgcactggctttgcgcacgattctgacgaatgagtatgaaggagtttctgtcacgatgagcaggacaagcgataagacggtcagcctgacggaaagaacggatgccgccaacagctggggcgcagattattttttatccattcatattaactcaggaggcggaaccggattcgaaagctatatttaccccggtgtcggagcgccgacctcgacttaccaatcagccgtccacacgcaagtaattcaagcatcgggttttaatgaccgcggaaaaaaaacagccaacttccatgtgctgcgggagacaaggatgccggcgattttgacggagaatggttttgttgatacgtcagctgatgcaaacaaactgaaaacagccagttttattgaaagccttgcaagaggacatgccaagggcttggagcaagctttcggtctaaaaaaaaaggctgacttatataaagtgcaaatcggcgcattcaacgtgaaagcaaatgctgatgcgcttgccgccgatgcggtgtctaaaggttttgacgcgattgtgcttccaaaaggcggcttatttaaagtgcagatcggcgcattctctttcagagattatgctgaagcgttggcagcgcgggccgaaaaagccggatttgatgccttcattgtgcaagactaaatgaaaaaacccctgctctccctttttgggacgaacgggggttttttgttattgaagtatatcggcgacaaaccgagaccaagcttcaagacgatgatacacattttcctctttcagttcgctcagtttcatccagcgcccggcgatttgatctttttctttcacttcgacttgtgctgcaggcgctaactggagcgcagaaaggatgccgatatgcaccttccctacatcgttttcatcatcattgatcaggccgagtgtgacaatgttttgtttgtcctcctcgcgaatgtacaattcttccgccagctcccggtcggtgttctgtttcagcacttccaaaaatgaagccgccccttccatagggttcatgtgtccgccgaagccgagagaaagcttattatggaggcgcgattcccctccgcccgcgagccgttcatacacaaatacctcatcatcgcggcggatgacgacatacggaatcggctgtttaaatcgcgggtcctcttccgcgtcgcctcttctgatttcaaaaaaatgcgcctcaatttgagccataatttttatgatacgttcatcctcgctgttgactccctgaaatgtcagcatttcgttttgaaagacgtcactccgcggtgcagccaagatgatttcatccattttattcatgcccgttcctcctgtcttacctctccactcaagccaaaagagcagatattatatctgctcttcatcttggccaaaataaaaatcttcgtccttaatcggttctaccgtcgcctttttgtagccgttccctttcatggagaagaaatcatgtgattttgttttggtgtttaatccgtttaatacaatcggattaatatcctcttcttcaaagtaaggatcgaaccctaagttcatcaaagctttattggcgttatagcggatgaatttctttacgtcatgagacagcccgacttggtcgtagagatcctctgtatattcaagctcattgtgataaagctcttctaaaagctcaaccgcaaattcgcgaagttccgcttttttcgcttctgtttgtttattgaatatttcctgggccagcagtccgacatatacaccgtggatcgcttcatcacgaagaatcaggttgatgatctcaccgctttgcatcagttttccctgtccgtaaaaatataacggataatagaaaccgctgtaaaaaaggaagctttccagatagacagaagcaaccatcgctttgaacagtgaaatttcatcatctttttgaatggctttgtaaagcccgacaatcatttgcgcttttttctgcagatatttattctgctttacccattcaaatacttcgttgatcgtttcagtcggagcaagcgtcataaaaatatttgaatatgattttgcgtgcaccgcgttttccatcatcgccatgaaattaagaaccgcttttcgctgatggccttcgacgtgctcggccacaatcggcatgcctgtgttcccctgctctgtatcaagcagtgtcaggccggcgagcaccttcatgtacgtatcctgctcatttttacccaaatacttccaagtaagaagatcgccgtttaatgcgatctcttccggaagccaaaactgctttacgttttggttgtagaacatttgggtgaaatcatcttcatgctttgaccagtttgctgcgtcataaatttttgtcactgttaactctcctttaatcaaacgacacaagaaagacagctgtcctgcccggtatctttcgttcttgcatagtaaatggttttgatgcctctatggtgggcatacagatcaatacggttcagatcacgagttgtcatcgtatctttcaaaaacagggtaaagctgattccctgatcgatatgctgctggattgtcgcgatcatatccaccactttgaacatgtccatatcataagcttctttgtagaagaaccagttattagacgctaaccccggcatcgggtaatacgtttttgaatttccgtatgttctttcttcgatccgttccatgatcggcataacggacgccgtgctggattggacgtaggaaatggagcctgtcggcgcgatgcacagtctgtagctgtggtacatgccgttttcggcgacaaacgccttcagctctttccagtcttcgattgtcgggatgtgcatgccttcaaagagcgcagcgattttttcgtatgccggtgagaactctttttcgatgtatttattgaaatattctcccgttgcataagtggagccttcgtaatgctcaaacgtttcgcctttttctttcgcaagctcagctgaacgctggatggaataaaagttcaccatcataaagaacgtattcgcaaaatctcttgcttccgggctttcataagcgatgccgttttgggccaggtagccgtgaaggttcatggcgcctaaaccgatcgacttcatcgctttgttcgcgcgtctgactgccggcgcgttgcggatatccgtcgtctcagatacatgagtcagggaatccgtcgcgagtttcaccgtgcgctcaatcgatttatgtttcatgacattcaaaatatttaatgaaccaaggttgcaggaaatgtccaggccgatttcgtcttcctcgtcataatctgtgtaagccgaaacctgtgacgcctgaagcacttcagagcaaaggttcgagaatttcacttttgatacgtggttattcgcatgctctttgtttacgttgtcctggaacataatgtacggataacctgactcagaacggagaacggcaagcttttcaagcaatttgcgcgcattcactttttcttttttgacacgcgggttgtcaacaagctcctcatacatcgccgtcatgtccatctcatccatatgctggccgtattctttataaatcgtgtgcggatagaatacataagccgctttgtcctcacgtgcaagctcaacgaacttatccggaatgacgacaccgatagaaagcgttttgacgcgcacatcttcatccgcagaaatctttttcgtatcaagaaagtcattgatatcgcggtggaaaatgtttaagtacgccgcgccagagccttgtctttggcccatttggtcagcgtaacggaacgcgttatcaagaagcttcatgacgcctacaacaccttttgtggcgttttcaacatctttaatcgcttcacctttcgcgcggagcttggacaggttaagagaaacaccgccgcccagtttagaaagctgcatggaaatatcgatcgcccgtgaaatatcgtttaaggaatcattgacttcgagcaagaaacagctcaccagttctccgcggcgttttctgccggcattcaaaaatgtcggtgtgctcggctgatattcctgattgatcatcagattcacatattcttttgctttctcagtgtcgccatttgcgaagaacagcgcaacaattgagatccggtcctcataacgctcgaggatttttttcttgtcattcgttttcaaagcatagtcattatagaatttaaacgcactcatgaaggaaggaaaacgaaacttcttagcgtaagctgtcttaaacacttctttaatgtcttcaaaagaataaaggcttaagaattcctcttcgtagtattggttttcaatcaaataatccagcttctcttttaaatcgtgaaagaaaactgtgttttgattgatatagtctacaaaatagctatgtacagcctctttatctttatcaaactggaattttccatcttgttggatcatgatttcgttatttaactggatccattttggcacttgattttgtgacaactctttctacctcctgagtaaacaattcaacgtctttagatgtgccgctgagttcaaatttgtgcaagatcggcacctgatattgtctagagatggtatcggcgctttttgcaaagttatcgccccatactttgttgccgctcgcagcgactcctaataagagatgggcgtatttttcgagaaatgattgtgttgatgccggtacctgaccgaagtttgtcgtgtaggtgaccaaaacaaacggagtgtccacgtggtccatttcgtccaccttgcggatcagctgaaagtctgttttattcacaaaacgctgaacattccctgtctttgaatcaaatatgatttgaaccatccttatcacgacctatcaaaaataatgaatctcttaacactatatatagtatactaacctctcagaaaaacacaacatattgagatcgatttataaaaaattcatatttttgaaagagcggactttggctccggcccgattaacgcccaaaaaagagagcagaacgagaatcatctctcatcctactcaaggtgtcatgtgtaagccgatgtctatcataacatgaaaaaaaactgcttagtagtctagacttttattcttattttttgtaagaatcacattttttttcgctttcaacggtttcttcaatctctacatcagcaccgatttctttcagtacggctttcagagcgcttgtgatggaagcctccctgatcagttctttgccgtcaacgatgatgctggttccatattcatagcaggaatcatcttcacaagtttcttcccaatggttgattatcaccttgtgtttcaatcgtctcaccctctgcatgatcaatgtcagtacttagtgtagcttgtgcggcccgctttgtaaattcgaacgcttgtgaaatttattcaagctcatccagcgccgtttcttttttcagttcgattttattcgttttttcatcatagcggtatatttttagataaccgccctcgacaatgccgaaacgattatgttccagctgcaccatgccttctgtctgcgattcggcatccgccaagccgccgtcatcatccgtcaccaccgtctcgtgattgctgcaagctccaaacagcaaaaaaacagcgatccaaacgagcgtaatcctgattcttctcagttcattttcactttcgaacacgattttccgaacccccttttatctttccgatatacggcctgcaatatacagacgcgcatagaaaaagaccattgttcatggtctttgtcaaaaagtctattcaagctcaagctggacgtttttttgcggggcgaacgtggagatggcatgtttataaataagctgctgcttcccctccgtttcgagcaaaacggtaaagttgtcaaagccttttacctggccgcgaagctgaaagccgttgagtaaaaacaccgtgacgaacgtattgtcttttcggatttgattcaaaaactgatcttgaatattaatcggtttcatgtttcgtcctccttggttctcaatacaatactgtttcgattaaatttccagttttcctgctatgcactcgaaaatttccttttttttctgctcaatatcaacaggcggcgtcatatctgtccatgaaacgggcattttattgcgaaaccaggtcagctggcgtttcgcatatcgccttgaattttgttttaattgctccacggcctgaggaagcggcacttttccatcaagatattcatacagctctttatagccgatcgcctgaatcgattggctgtcccggatattcatatcatacagccgctttacttcgtcaagaaggccggtttccagcatcaggtcaacgcgctcgttaatccggccgtacagtacttctctgtccattgtaagaccgataagaaccgcattgtaaagcagctcccgtttttgggttttaagatgctctgacattgtttttcccgatacatgcaggatttcgagcgcgcggatgactcttcgcgtattgttttgatgaatggctgccgccgcttccgggtcggctgccgcaagcttggcatgaagcgcttccgccccttcttcagccgccagtttctccattcgctcccggaatacagggtcgccggagttttccgtgaacgtatagtcatacagcacggactgaatgtacagacccgtccccccgacaatcatcggcagctttcctctaccggcaatctcggtgatttttcccctcaccattttctgataatccgccgttgaaaaagtgtcggacggctccaaaatatcaatcaggtgatgcggcacgccttctgtctcttcttcggtgactttggccgttccgatgtccatccctttatatacctgcatggaatctccgctgatgatttccgcattcagcattttcgcgagtccgatgcttagttttgtttttccgactgccgtcggtccgacgagtatgacgacaggctgttttttatttttcaatatgtatcactctcttttataaatctccccctaattatagcattcatttcttcaggcacctatccattttgccctttttcctgagcgctaaacgtccgctaccacccgatcggctcgtttccgacaacctctctcgtttttcctttgagcgtatggcggtgcgttttccgtccttcctcccgcggatcgtaaacgacgccgccatgctggatccgaatcggctcattgtaggcggcaaaggtggtctctgaaagctcatggtaatgtgttccgtcaaccctcgggatggcagggccggaaatgccgtaatacctatgaaaatggccgttttcaaacgaggtgatgcccgtatagaaatgtgtatgctcatctgtattgctgccgttctccggctgcgaaaagccttcgatcatatggtagtgcccctgcactacatccgtaacagcccggtatgcgtgtgtgtgcggaggtttttttgaccaatcggactgatacaggcccacaaaagctcactcctttatttttttgataaatgcccaatcaaaaattggtgggctgaatactctgttatcatctcaaatttattcttggaggtacctaaattatgaatgaagaatacacatatgcagcagatagtgatatgagaccgtttggacggcccggatttgggtttggacggccgggcttcgggttcgggcggcccggattcggcttcggcttcgggcggccgggttttggatttggccggccttggtttggttatggattcggacggccgtttggtttttacggcggaccgttcttcggagggcttgtcggggggcttgtcggaagcgctttattcaatccgtacctgtacggaggttacggctacccttactatccgtattactactaagacaatcaaaaagggctcctttcaggggcctttttatataggcctaatgtcttgacttggcgggcaaagttcggatattattttattttactgccttaaacaaaaggcataaggattatgatgagagggggatttgatatgattctgggttatatcttcctcacaattgctattttatcagagtcaatcggcgcggccatgctgaaggtctcccgcggatttacgcggtttttgccgagcgcgcttgtagtggcaggctattcattggccttttatatgctttcacttacactgaatctcattccgctcagcttatcctatgcaacatggagcggagcgggaacggtgctcgcatccattatcggagcgaaatggtttcatgaaaaactggacaagcaggccgtcatcggacttgtattcttattggccggtgtcattctgatgaattggtagaaaggagaagcatgatatgaaaggattactctgcctggcattagccattgtatcagaagtgttcggaagcacgatgctgaagctgtcggacggttttacgcacttatggcccgctctcggcgtcattgccggaatcggagcctcttttatgtttttgagcttctctttgaaaagccttgatttatccgccgcatacgcgacatggtcaggtgtcggcacggctttaacggcaattgtcggcttttttgtttttaaggaagccatgacagctaaaatgatgatcgggcttatttttgtcatcacgggcgtcatcctgctgaaccgttccaagtctcaaaaagctaaaaaaaatcaaacggcccggagctgaccgtttgaactcgtcaagcgcgggcagcttttacttcaacctcaagctccatctccacgtttccttggaccgctcgtgaaatcatacatgaggactccgctttttgcgctaacttcctggcgagcgtaaagtccgtttcggctgcatccggctttaataatataaacgggcggtgaatgattttctggtacgtgaacacaccgttcgtgacgtctacaattccttcagattccatatgtagatcttctttatccaggccgcttctttccatcatcgccgcaagcgttataatataacaggtcgcggccgctccaagcagcatttcatcaggatttgtgccttctccgggtccgtccatttccttaggaatggacacagcggtttccagccggccgcttttaatatcgccgacgtcattgcgatttccgggccaatttgcttttaaataaaagtgatgttttgccaagggacaaacctccttttttttcagtttactcacctttcactggtttgtctttttttaagctcacgaatactcttgattgatcactctttttatcgtacggacaaaccggtaaaattcctccgtttttgtgaattccctttcgcggtaatcaaaattatcaaaaaacgcctcccgctgttctctgctgatctcaagctgtatactcagcccggtttgcgcctggttattgatattttcggtgtcaaccccggccagaccggtttttgaggttgccaattctgtaggaaatccgtttcgtttgagagctctcaccaattttttcgcccgcttccggtcgcttcctccgacaagagtatttttctcgtcgcctttataaccgtgaactgcgataacataatggtgctgcttaatgctttcgactgctgaaggctcatcgaacttggtgctcgtaatatgaagagtctggttatcatgcgcttttaatccctcaaacaggtaggttgaataatcatccctgaaagagcggacgatctcgctcaccccgccctcaattctccctccgtgcggggacatgatcaatacggggctcccctttctcttattgtacgatatatgataatcatcggggtcttcatgttcagccagatctttaaaatctgtgtatgtatcagaagaattcgagggatcagggtctgacgcataatgagcacatcttattagtaagaccattgctacgataatgatgacattaagtaaaattcttttcatcagctctccttctttgctcctttctgaaaaatgaaatattcattatatggatttttgtcaataggtcttatcttaacattctattaacattatcatcagtgaaaaacttcccggtttcgaaaaatcaatggattgtcacggttcaagcgctcaaatgccgggcatcagtgaaaaaaggttgagagagggcaaaaaaaaagggaggaacgcccgaattttcaggggcgggagattcacggccggaaacggacggcatcaagaatacgcttttagaaatgaatatccgcctcccgaagcaaatgcgcaggacagaatggagcccgtcaaaaaagttctcatctgcctttttgtacagcaaaatgccattacagcccgctcatcccctttttttatcataatggtccgttttgaaacggagccgtctctttattcatatatataatatcaatcggaagctgtttttccaaggaatgtctcaatatgatgttcatgtatatactaccttccgccggcttcattacaaaacgaacaaacgttccgtttcaactcgatttcttctcctgaaaaagccgcaagtaaccagcgctcctgaaggacaaacaaactgaccgaacttacggcctgttcatatggtatagagagaatcgccagaatgggaggaaaagtatatatgtttggttactcaatggtacaaatggtgcggtcaaatgctcataagctggactggccgctcagagaaaacgtattacagttatataaacctttcaaatggacaccttgctttttacacaattttttcgaaaaaaaggtgaaaaacagaaagaaaatgtcagtcatcattgaatttgaagagggctgccatgaatccggttttcacagcacaggacaggtcttatcaaaagaaaaacgctgcaccataaaaaagcagtttcaaacaatcaattgctgcagcgccgaagtcacgccgtccgcccttcacatgcttctttcgcaatgccgggatatccgtaaaatctatttaaaccgtgaagtaaaagctctccttgatacagcagctgaatcgtctcatgcaaaagaagtgacccgtaacggcaccgtattaacaggaaaaggcgtaaccgtcgccgttattgataccggaatctatcagcatcctgatttagaaggcaggattatcggctttgcggactttgtcaaccaaaagacagaaccgtatgatgacaacggacacggcacccattgcgccggtgatatcgcaagcagcggcgcttcatcttcgggtaaatatcaggggccggcgccggaagccgatctgatcggagtcaaggttttaaacaaatcaggatcaggaaccttggctgatatcattgaaggtgtggaatggtgcatacaatataataaagaacacacaaagaatccgatcagaatcatcagcatgtcgctgggcggagatgcgctcaaatatgataaagaaacggacgacccgctcgtcaaggccgttgaagaggcatggaatgaaggaatcgtcgtctgcgtcgccgcgggcaactccggtccggaagctcaaacgatttcaagccccggtgtcagcgagaaggtcatcacggtaggcgcctatgatgacaatgatacagccagcaatgaggacgatacggtcgcttctttctcaagccgcggcccgacggtgtacggaaaagagaagcctgacattcttgcgcccggggtcgatatcgtatctcttcgttctccgcgttcatatcttgacaaattacagaaatcaaaccgagtaggctccttgtatttcagtctgtcgggcacgtccatggccactccgatctgtgcgggcatcgctgccttaatccttcagcaaaacccgcagctttcgcctgacgaagtgaaaacattgatcagacaaagtccggatcaatggacaaatgaagatccgaacatttacggagcgggcgcagtgaacgccgaaaacgccgtgccgaaagagtaacctttttatcatgagaacggggtcgtctgcaccggcagatgactccgtttttcaggtgaatagatgaaacatttataatgaaggaactcggaacaggtcagaaccggctgtcagaaaaaaagatcaacgcaaggcagtgtatttctaaaaaaatagggaataagtatggtgtagataaaaggaggaatcacaatggcacttacaaacaccgaattgtctgaatggctgcaaaaacagatcggacaaacgcttgatatcagaaaaggagagctgacagacagccgaaacgagatttctgatatggatcagatcatgcttcaccttgatgacgttctcgtccgccggacaaaccatcccgatgactatgtagcggatgaagaactcgtcttaaaagggcacggcacaacctatacggaggaaggaaatgtcccgcttccccaagatgcgtatgaaattcctctgctcggcgacattaccatccaacaggagcaagacggattaaaggtacatacagatcgggccgtgtatacaatcgggacccggaaagagcaataaaaagaaaaaacgccgtgaaacagcggcgttttttattggtttttttcttcagaatatccgtggaacatcgtgaatgcgcaaagcataatgcctaaaataatgataatcgggagccagatcacggcaaacttataatccggttcggcaaaagcgcctatgaccgccccaaagcaatacagaaccaaggcaagcgcgcgcaatacagcatctctcgtaaactgcttccgcttgtccgctttgtaaaaccttgcggtgagatcttcaaaaaaattagcgagcgttcccgttaatacggtcgtggaaatccccgctacaccaagttttctcgcggctgtcgtctgcattcccattgcgaagctgagcagcataatcagcacataaacagaaatggcgtctgcaaaaaagcaggagaacaaagcaaacagcagcaaaacagctccttcaatagctaaagcggcagttaccgcaggggccagaatgatttctttttattgcccacaagcagggccgcggcaataacgccggcaataaatccgattaacgaggttaacgatttgagtacggcaaggtgccatgagttgccgatcgccaggccgaacagaacgatgttccccgtcatattggcggtaaagatatgtcccaggcttaaataaccgatcacatccacaattcccgctgttaaacaaagaagtaaaagtgcaatatttcggtatgtagtcactgtcaatgtgatccaatcctttctcatgctgattccaacatataagtttactctttgccatttcatatgtccagccggcgtgccgctttttcaaagcataaaaaaactccggcgaaccggagaagttactgaacgataaataatactctcgtgccgtcggaatagccgctcatttgatttccaacccatgaaccggccccgcggttatccgatggggttacatatctgatatcagcccccgccccgccttctgtgcagactgccatgggccattcatcacggtcaaacccgggctttgtcggaattcctttcaatgattctttccttctgttctccgctccgccccgatcaattgtacaaatctcagaatgacctgccgaaatggcgtcttttatatgatttcccgtctccggatattttgacagcgggaaatacagcacctgatcgtatcgggatgcagcatgagcagcactgtccgaatggatgccggcgcccgtaaggccgaactgaagagagatcaccaaaagcagacttgccgcccatttcataaacgcattcattcacatcctccttaagaagttgatatgaagcgtaaatatgtatattagccggatttaacacacatgatgaaatggcaaaaaaagtttgctgttttgttgataatcaacgaaaatggcggctttacgatttgtctattgaaccggcttctttttccttatatattttagacatacttatgagccgttgtgatcagtgtcttcggcagataaaaggaggaatgccgtccggtcggcaggcaccggctgttggttatgtcttttcaaaaacatgaaggcggggaaatccagatggaaaaaacaatgtttcacccacactcacccgagtttcacgaagacccttttgcggttttaagcagattcagagagcaggaccccatacataaattcgaactgcagcgtttcggaggcacctttccggcatggctcatcacgcgttatgatgattgtatggcgtttttaaaagacggcagaattacgagagatgtaaaacgggttatgccgaaggagctgatcgcgaagctgaatgtcagcgaagatatcgattttgtctcagagcatatgctggcaaaagaccctccggatcattcacgtcttcgatctttggtgcatcagggttcactccccggatgattgagcagcttcgcaccgggatagagcagatcacagaagagctgctggatgaaatggaaacaaaagcagaccctgatatcatgaaagatttcgcggcaccgcttccgtttatcgtcatttccgagctgctcggaattccgaaagaggaccgcgccaaatttcaagtatggacaaacgcgatggtcgacacgtcagagagcggacaagatgcgaccaaccaggctctcaaagaatttaaacaatatatgaaaacactgatcgaagaaaaaagaaaacatcccgctgaagatctgacaagcaagcttatttacgctgaagaggacggccaaaagctgagtgaatcagagctgtattccatgctgtttttgttagtcgttgccgggcttgaaacaacggttaaccttctcggctccggcaccctggcgcttcttctgcacaaagaccagatggagaagataaagcgacagcccgaaaatatccagacggcggtcgaagagcttttgcgttacacctctcccgtcatcatgatggcgaatcgatgggcgattgaagatttcacctataaagatgtttctattaaaaaaggcgatatgatatttatcggcatcggttcagccaatcgggacccggaatatttcgatgatcctgatacattaaatatagcgagaacaccgaaccgtcatatctcttttggattcggcattcatttttgtctcggggctccgctcgcccggatggaagcatccattgcctttacttcgcttttaaaacggtttccgaatatagagctgaaaggcgcgcacgaggatgtaaagtggagaaaaaacgtgtttttgagagggcttgaaacattgcctgtcagattttaatatcgccccctgtttatcgggggttttttaatgtcttataaacaggaaatcaatataacagtgaatatttagtacatagtgtatttagttctattgtaaaaaaagcggccggattgctccggccgttctctattaccgttttaccaactcatttgtttcgtccagcttttttttgaaagatttaaggaaatttgcgcttatcgttcctttgtttgcgtacagtttttcgcagaatgccttaatggcgttttgcggctttggttccgacagcattgtgacatgattggaagagtggacgtccagcaggtgaaagtgtttcatctggtgttcccattctttccaatacgcatcatggtctaacggaatttgttcttcctctgctgtcagataacgttcaaaatctccgagaaacaaaccgcttttattacggaagtagtagcattgcagcgcttccggatgaggcagcggcttcatgtcatactcttccattccgtaagcgagctgcgtcttcatcatttgctccagctgcatccggatcgcttcttcggattttggcagaccgcgctttttggcaaggccgatcaattctttcaatacttcttcttcctcagcctggacggtaatgtcttctctgctgattaatgcctcttcaaggttttcaggcttaagatatgccgtaagcatcgtattgatcgtttgcagcatgactgacttaacagatggttttctctctttccatttttcactgtacggggtgtcgatcatgacggcgctttttactgtatgaccttcctcctgcaagaggcgcgcggtttcataagcaagcatcccgcccaaggaatatccgccgaggtcataagggcctttcggctgtaccgcttggatgattctcatataagaagcggccgtctcttcgattccttgcagcggctctttccctgtcaaacctcttgcctggatgccgtaaaaaggacgctgactctttttggcgaatggctggtatgcttcaacgcctcctgttccgccgtgaaaccaaaaaacaggacggcctttttctctttcattcagcttgacgagttcgggaaaattccggcccgcttcatgcggctggttcgtttttaacagcatgccgatctcctgaagagtgctgcatttctgaagagcttccagactgatgcggctgtctccgtcctcaagttttttcagcagctgaatagaggagattgaatcaaagccgtattcagtcagcggcttattttgatcaatttccgctgccttcatccccaaaatgtcagccacaatgtcagctgcgctctcgcggcggagctgagggtcctgggaaaccggcgcaagggtgatgtcttctggctgaccgccattccaatacttgtggtgttcaaaaggatatgtcggaagcggcactctttgaacagatttgccttggtggagtctgtcccacggtatatccgctcctttcacccagcaaaatgcaagcttttccagattgttttcagccaacagcgtctccgtgacgactgtaccgagagtcccttccagtaaaacgccgatatctcctgatccagtctgctgactgcctgtaaagaagcttttcattccattgctttcttcggaaaatgctctgtactctttcagtttttccagcaattcatcttgattgcgggcaacgagtgccaagcggcagttcatcgcctcacggccggtctgaagcgtataagcaatatcccgcagtgacggagtatctccagtttgcacaaaatcagccagctgacctgcggccgccttaagacgcccttcgctcttagcagaaagcacgataagctgcgggtcatgcgcagattctttgtctttatggctcggactgtactgttccaagacgacatgcgcattcatgccgccgaagccatagctgttaattgcggcccggcgcgggatcggtctgcccgtatggtcggtgagctgtgaccattcctgattgtcttcggtgaaacggaagcggcttttctgaataaccatttgctcatttgcagctgtaaatccgggaatgcccgggatggtatgatgcttcatggccatcgctacttttataagggcggccagtccggaagcgagttcgccgtgcccgatgcaaggtttcacggtgctgatataacaaggcgcgctttcctcttgatttgcagactcgccgtaacccgctttgattgcattaaactccagcgcatctgccatttcggaggcaatgccgtgcgcttcaatataagtgacggtttgcggatcaacatcggtgtcttcgtacgcttttttcatcgcggccttcattcccgccggattcggtgcgtgaagcgacatgcctttaccgccgtgagacactcctgttcctttaatgaccatgtgaatatgatcgccgtcttcaattgccgcctcaagcggtttgatgatgataacgcccgccccttcgcttctgacaaagccatcggcatctttttggaacgatttcgcccggccgtttttgcttaaatatcccatcgagtcaaaaccgataaaacctttcggcgattgcagaatattggcggcgcccacgacagcctgctcacattcgttatgatggattgattgaaccgccctgtgcaatgccaccagcgttgacgtgcaggcagcctcgtaatattcactcggtccttgtaaattcaaggcatatgatatcctgttcggaatgatggacggaatggctgttccattgttcggatcgctgttgcccgcggcaacgaaaacgcctgtcggtctgcttgataatgccttatttgtcaggcccgcatcctccattgccttccatgtatgcatcaaaagcagaaactgctccggccccatttgtgatgcctctttaggagaaattccgaaaaagagcgggtcaaattcgccgacaccgtcaataaaaccgccccatctgagactcgtgtcattctcatcgccggcgtaacggcgccagtcccagcggtccgccggaatttcggtaatacagtgatccccgtttacgatgtgtccccaaaaagactggatatccggggattgcggaaactgagctgacataccgataatcgcgattccttgcttgacatcggcgttttcacaaggcgtatgctgtttcttcggtaaagtgcgctcttctgtttccgtgaccccggcctcttctgaatgcctatgatcggcaagcaattgagaaaacttgctctcatatgctgacgcgaagtggcgggtcagctcctccgccgtcggatactcgaaaaacaatgttggattcacatcgatgtccgcctcttggccgatctcttttgtcagcccgatcagactcgctgaatcaagtcccaattccatgatattcgcgtcagaacgaagagatgacgcgggttcatccatcatcttggcgagcttgccaaggacgtagctgcggatatcatctgtcagactgccggcagaaatcggtgctcccgcattcttaacagccgttcgggccggctgattcatctgttcggttttcgggcggaaccgtttcagggcatagccttcaaaacgcatcaccacttccgatcggctgctgatgacatctgcgttaatcagaatcatttcccccgtttgtttagccagcttgatgtgcagccagcaatcggtaagattttccgggctgctgaaggtgacggaattaatgccgaacggcagatagctttccgtctctgtttggtccaataaagaaagcgaggccaagtaagcactgttggcgattaatggatttatggcataatgatgcgcttgttgtgagtcgctattgttcaggttcactttcgctaaaacggcatcagtgcctttgtacagacgggtgatcgttttaaattcttctccccacacgacggttcccgttccatctccgtataactcatctatccggcccacttcccggtaagagcgctgaatggccgccagatctgcgtgctgcttttgaaacggatacgggctgcactcggcatacgccgctatgctccaatcaggagacgtgcggctgcggtgcattatgctcagttcaaatccatccccgttttgtttcgattctgttttcagctcgatgtgatcgcctttttttacggtaatggggctgacgtaattcagttttttaatatgtcctccttccgcttcaggaaaaaggtcacaaaaatgatcgactgccagactgttatatgtagcgccgacgagtaccggttctccgccgaattgatgccctttcacgtatgggtcgtcatcactgtataccgcctgaacgccggcagcgttttctgattcaccgaaatgaaaagaagtcccgtggtcaaaagcgtaggccggcagatgaacggcgtgctcttgctgcaactgatcaaacgtgatattctctcctttttcccattgccgcgcacgccggccgatatcagaatcggagaaattgagattccgctgatccatgcggtaagcggccagtttttccagcagttcctgaacggaagcagccgtaaatgccgcccgatactccggatgatgcgttcttttttgcagcgcagatgcgatggcggccggatgaagagatggcgtcttttctaaaaaggccgccagtctctcaagataggcttcaaaactccattttgttttcgctgacacagggaaaatatattcctcatcgccgtgacgggcctgatcggaattcgggctgatatattcttctacgatgagatttgcatatgccccgcctgccccgaaggaattgatcatgcttctccgcggtacgatgtctcccgtctcggcatccttcagacgctcccaatactcggttttctcctgcaggtaaaaggccgtttgttcaagcgcgatattcggattttgcggttttgcgttaatggtcggaactaatgtttcccgctccatttgcagcagcactttcgcgagctgggacatcccggaggccgcctctaaatggccgagatttgacttgacggatccaagcgcgcaaaatcgttttttatcggtatattgcgagaacgcgttcgtcagggcaatgacctcaatcggatctcccaatacagagccgtttgccgctgattcaacataactgattgtttccggattgattccggctttgtcaatggaagccgccatgagcttcgcctgctgtttcggatccggagccgtgtacatctgccttccgccgctatggcacaacgcgctgcttttaatgaccccgtaaatatggtctttgtcggcaaccgctttggagagcggcttcaagagcaccgcaccgactccttctcccggcatcagccccgtgccggttccgaagcttttgctttcacttccctgttcaagcaaattcgcccgttcgagcgcatcatatttagacggttcaagcgtgagattgacccccccggcaatcgccatggaacagctgttaagcttcaggctttcacaggcgagatgaatggcgctcagtgagctggagcatgcggtcgtaacgcccatgctcgggcccgttaaattgaaaaagtgggaaatgcggttggcgatatgccaatcccctccgttagagctgagcgcagctttttccaatgacgggatattccagaaatattgattgtacatactgcccataaatacaccgattccgctgtctgattcctgccattcgtttactctctctaacgagtagccgccgttttcaaatgtttcccatacggtttcaaggcttagacggagctcaggtgtcatctccatcacatggtcttcccggatgtcaaacaagtgatggtcaaaagcgtcaatatgctgcagaaatccgccgtaccgtgttttgcgttcttcttttcgtgtttcttttgccatcgttttcagaagaccggacttccatctgttttccggagcttccgtaatacagctgtctccggcttttaaatgctcccacagctcatcgagggtttcagactcgggatagcggccgctgatgccgataatggcaatgtcgtcacgatctgagcgattatcggtgacggtttctgtttccggctttggcgcttttggctctttttgttcagtgataaatcgccgcgtttccgtgacaagcggcaccggttcattcattgcaggttccggatgctccgtttcaggaggcgcttgatcggctccgaatgcctgttgcagcttatccgggtaagtttccagcaaatactcggcaagttctttcgtattcgtgtgttcaaataagaccgttttcggcagctcgcccgtcaatgtttccagttcacggataaaattcacctgcaaaatggagtcgatgccgtatttttcaaagctggtttccggctgaatgcgctcgggagcaagctttatggacttggctaacgtttcttttatgaattgcaccgtccggtctgtgactgagaaagacggttctgtgaaatcagccggctctttggaagccgcaatttcttcaaccgccggcgcgtccggctgcttttgcctgatgacgccgtcgctttctgctgccacgatctgctggccgaggtgatgtgacgattccgccataaatgtaacgtaccgatatccctcgctttccagcgcagactgccacgcttcaggatacagcccagggcatccgggaatacgcagtttggcgtcttcatacagccaccagccttccaaaagaccgaatgtcagatgagaataaaccgaatggctgctgatctcatttaatagcaaaatcccattctttttaagcaccgctttggcattgcgaagtgtccgccgaatattttttgtcgcgtgaagcacatttgccgcaattaccgcgtcatatgcacccgcctctataccctgcaaagccgggggctcttccacattaaaccgcttataagtcaaatacggattgtcgggaccgtattctttttcagcatgcatgaaaaaggcctttgacagatcggtgtagcaatattctttcacatgatgtttgacctcttttaatcttttgaaaacggccgcgctcgtcccgcccgtccccgctccgatctctaatatccggatttccgcgttcgggtcttctttcaggcgttcttcaatgaaagccgtcaatgtgtcagcgagcacctcattaaagtagtctgccgtttcattgtttttatagattccttcaaccaattccattgaggaatcaggaaacagaacatcagtggcagaaactctgccggataaaatatccggcaaagctctgagagcggtctccactaaggtgatcatcgcccgtttgctgctgtccttgagtaaaggagctttcttttcatcccattcttgccacagaacgtccgcacgctctatcggacccgttaacacatacgtactgccagactgtttcaaaaagcctttttgcaccaagatggagatgctttcttccagccacctgccgtaaaacccctgcataacaggctgcgtttcgttttccgtaaaaaatccgacagatttcagctggcctgccaatagtttgtaaagaagatcttcagtgttttgcaaagccgtcccctccttaactcaattgttgtacatgtcttgttactttaggctgatagcttcgcagtttttgcatcgccgagccgtgatgttcagggtatacttctatcatttcttccggtttttcctccggctcttccgcctgtttcatcatgacgaactgattcaatgggccgccgagcaatcgttcaagcgccgccattgcttccggcgcttcaattgatccgactcccgcctgtttcatccgttcttgatattcggcagatgatacgattccgacactgccccagtagctccaattcatcactgccgccgaatacggccgaacttgagccaaatgagcggcaaaggcatctttgaaactgcacccggcagcataattgctttgtccggccgctcgcgcaaatgattgaacggatgagaagaacaaagcaaagtccagcggctcattttggaacacgagggccatattcacgctgacattgacttttgcagcgagcacgcttctcaaacggctttccggcatattcgccaggctctgatcctctaaaacaattgcggaatggatgattccgttaatttgcgggtgcgtgcgtttgatcgtttcatacgcccgtgtgagctcatccgggtttgccgcgtcagcttcaatataaatcggcgccggcccgaattggctgagtctgtcgattttttcctggatggcgctgttatgttttcgtctgccgatccaaacgactcgcgcctgatacgttttcacggcatattcgctccatgcttcgccgatgccccccgcgccgccaatgacgacataaacgccgcctttttggtaagcgggccggcttgacaccggctgctgtacagggatgaggcgctgtttgtaccagtgattgttgcggtacgcccatgtattgccttgctcatcaaacggcgctgagaacagctccgcctttgaaacatcttccggacatccggcatcaatcagccgtgtttgccagttcggatactcttttgcgagcgaaccgatcaaaccgtgaatgcctgcatgagccggatcaatgatgtccgccggctgtacggactgtgtttttattgtgactgcagtcaagctgattcgcttgcttccgtatcctaaagcaagcatcgctttaatcactctgtacatctggatgacgcccgcatcttgagctttcaccatgtcaccatcgctgtgaaaaggagcgatccatacgatatgcccgaaagaccctcttgctttcagttcagccgcaacagcctctatttcatcctccgggttgatatgaagccgtttcgcagaaggatgatgcaattgaaaagcctcgctttcctcatcccctgcgataaagacaacctcttccgtcttatatgccgggctttggtcacggaattccgcaagatcccataccggagccagaaggtttgctccatttaatgatgtttccggcgccggtccttccatcattctggaagaaatccctttaatcctgacacagacgcggcctgtctcatcgcataagtcaatgtccagccgctgtattttttcatccgttccccgggagctgacatacgcccacatgctggtcgtgcacgggctgaaaatgtccagttcctcaagggcgaacggcagtgacagctggttatcatctgcatgcagcttcagtccgattgtcgcttgcagagctgaatcaagcatacacgggtgaagaacgtattgatctgctgtttcttcgaggaaggaaggcagacggagctcagctaatgcttgattgcttccgatatgaatgtgctgaattccttgttgtccgggaccgtagtcaatgccgattttgttgaataagccgtaacactgttcagaagtcagcatgctgaggccgcattgagctttcagtgcgcctatatcacggtgcggagcctccccggcgccgagaatgccggcagccccctgacagtgtatctgcctgccgcttgcttctgtttgtgaatccgtgtaaatgtcatacacgatttcaccgtttcccctcgggttcaggctgatttgcgcttcaatcgggcggttttccgcttcgatcggccgaacccaaacgatgtttttcagacggatgacagacggaacttccttttgccctttgactgcctgagcaaccgccgccctggccatttccaagtaggcgacgcccggcatgaccggcttgcctttaataagatgatcggtgaaaatcgtctcttgtcccgtaaattcggatcggtaccgctgctctgttaaatccgatacattctcgtgtagcagcgggtgcagcacccgcgccgtcggcacagcttgcggtttttctgctttcggccggttgtccgtgatccagtaccgctctttcgcaaacgggtaagcaggaagactcatccgttggggcttgatatcagaatataagccgtcccatttgatatccgcgccctgcacccataattccgcaagcttgtcattctcccggcggcttatcagctcttcgatatccgcttcgccgtttgcgcctgccataatggatttcagcgggattttacccgcttttcctttataaatgcccgctttgtcataacgtcctttcgcacagctctttagcttgtcccgcagttcttcggccgaggaagcgataatggccgctctttcttccatcgcatcacgcccctgctgaagcgtgtaagcaacatcggcaagatccgcatccgtaaaagaagcttgcgccagctgctgcgcctgttcctgcagacgttcttcttctttggccgacagcacaaagatttgagggtgtgtgaaaacagctgtttttctttcttccttcgggatatattcttcaatgacgacatgggcgtttacgccgccgatgccgaaagaactgattcccgcacggcgcggcagatgattgccgttttcgtctttcaatgctgtccattctcttttttcctgtacgatgtaaaacggactgtctttcagtttgatatacgggttgatgacctcgctgtggaggctttttgcaagtgttttatgcttcatctgcatcagcactttgatcacacccgcgacaccggctgccagtgacaggtggccgatattggtttttgccgatcccaaaccgcagtgactcgcgtaaacggcgggatcgcctgttttttcgtacagcttttgaaaggcggatttcaggccgttgatttcgaccggatcgccaagctccgttccggttccgtgcgcttctatataagtgacggttctcggatcaatgcccgctttgtcataagccgttctgacgacttccgcctgggctttcggattcggtgtcgtcaaggagttcgcacgtccgccgtggttgaccgcgctgcctttaatgacgccgtaaatatgatcgcctgatttttccgcttctgacagctttttcaaaaacagaattccggcaccttcactgacggcaaatccgtccgccctgtcggagaacgttttgcatttcccttctttgctcagcgcacccgctttatcataagcgatgtggccttgcggtgtgacgacggtattcacgccgccggcgatcgccatctcgcagttcccgttttcaatggcgcatacggcgtgatgaatcgcgaccagcgagctggaacaagccgtgtcgatcggttcactcggcccgtgcagattgagcatatagctgacgcggttcggccctgctgacggactcatatttgcggctgacgcaccgccgatatccaggtcggaaaacagtgagccgtacccggtatttcccgtgccgatatacaggcctgttttcgtgccggaaaggcttttagtggaatatcccgcatcttctatcgccttccacgcatacatcattaacaagcgctgctggggatccatctgttcggcttccagcggtgaaattccgaagaacagcggatcaaattccgcaactccgtcaataaatccgccccactttacatttgttttgttggcttcgttaagcgggtcaccgtaatactcctgccagtcccagcgatccgccggcacctctgttatacaatcttttccctcttctaaattgcgccaatactcatcaatatttgcggccttcggaaacactccgctcatgccgacaatggcgatcggttccggtttatgttcagccgcagtctgaacatgctgtacggctgtttttgcaaatcgtttgttccctgccagtctgatgccgccatcatctgttacaccgcttttcttttcttctttcggctgtgtgctgccggcaaattgcgtttgatagtcttctgctaaatgatgcgccaaggcttgaatcgtcgcatattcaaaaaatacggtcggtgtcagatcaagctgataagtgtcattcagcttgttggcgaattccgtcagcgtaatggaatcaaatccgtattgattgaactccaattcgatatcgatttcttcaatgtttattttcagaagcccggaaacttcttttgccagcaattcctgaagtttggccgtcaggtctttcggcgcaggtgtttcttccgttttcttaatcggtgcaaaagcggatgcgggagtcttttgaagcagtttttcccgcattacggcgcggtttccttctataacgagcacgcttgttttccccgtgctccatgctttgtaaagagcttctattccggtttcagtgcgcatcggcgttacaccggttcttttttcggtgagcttcgccatttcttcattgacttgcattccgccgtctttccaaagcggccaattgattgacaatgtgtgaccgtggcggtacattgccgtaaccagcgcgttgcggtatgccgcatagctgtccataaatgcgtttgccgccgcataatccgcctgtcccgcattcccggtgacaccggaaatggatgagaaaacgatgaaaaagtccagcgctaaatgctcggttgcttcatcaaggttgacaaatccgtccgttttaggagccaatacactgtaaaactcttcggttgttttctttacgatatattgatctttcatcacacccgcgctatgaatgatgccgtgaaggccgccatattccgtttcaattgttttgaccaggtctgccgcagttagagcgtttgttacgtcagcctgtttgtattccgcttttgctccgagtgattcaagcgatttcagctgcatccgctgattctcgcttaatgcggaacggcctgtcaaaaccagcgtcggctctttgactttccgggcgatttctttcgcgaaaataaagccgaggccccggctcctccggtaatgagataaatccctccgtcgttccacggaatgcgtattttgccgccggacacggccgtttctttgacatctgcgctgtatcggatgccgtttttatatttgatatggctgtcatcagcccttgttttattttctctgatgatgtctgtgattctgccgttttccgctggttctatttcaatcagctgggttttcagttttttatgttccaggccggctgtttttagcagagctgaaatccctgagagcagctgatgcttatctgttttagagagaaccgtctggataaggacgtctccttccgtctcttccttcagcagtttttgcagcgtctccaatatccgtcctgtataatcacggaagcgcgccgccgctttcccgtgcagggaggtcatttcaatacattcagctcccgcggcttcaaccgcttgttttagtccggcgtctgtgtcacaaagcattacgatatgccgggcaaaaaccggttccgtttgagcagcagtttcatcgcttcgtgtccataccggctcaagcatgagcgtttccggagctttttcttttttctcaggttctttttcagccgttctgaatgacaaacctttcagccttacgcaaaccttgccattttcatcacaaatatcaagatcgcgtttttcaacatgtccggctttgtggtcttcagaaagtctggcgtaaacccacatctcggcagcgcatgcgctgaatacttcaagctcctgaaccgcaaacggaagcatcagttgttcatcatttgttccggttaatatgcttgatgcctgcaatgcagagtccattaagcccggatgcatgacatactcctgtaccgtgtccgcacaagccgcatcaagagacagtctgcccaatacgaaatcatcacctgtataaatcgctttgacaccccggaaagccgggccgtaatcaaaaccgattttgcggtacatatcgtacacttcatctgcagaaaacggtgtctcggcggattgtgatctcagtttttggagatcaatgaccggagcctttgcgtcagggcggactgatactgccccttggctgtaaacggacggctgatctgtttcccggccgcagtaaatgtcgaattgaacgtcatttgccgtttcgggaatgagacggatgttgacatgaaccggctcgtcttcaatggtaatcggccgcacccaaaccgtattcttaagctggacgcttccttgtccggccggaacttcagatgcctgttccattgctgcgcgcgccatttcaagatgtgccacacccggtaaaatcggcacgccttttacaacatgatccgcaaggtaaaattcttctcctgtatagattgagctgaaccgctgttctgcaaggtttgaagtatttctgtgcagaagcggatgaagcgcgtcttgttttccggcagatacagtgcttgttttttcgtgttttccggtgtgtttcgccgcccaatagcggtcttttgcaaaaggatacgacggcaggctcatgcgtttaggcggccggtctccatacagcttcgcccaatcgacgttcagccctttgacccataattcaagcagcttcgcgtatttgccgcgtgccatccatttttcaacggcttcttgaatttcttcatcttccgtcagcatttgcagcgtgcctttgtctattcttcctctgtacaaatccgcatgcttatctccagtgataaactgtgacagtttttcctgcagttcttctgcggatccggcaataaccgccaggcgttcttccatggcgtcccttccgatttggagagtatatgccatagaaacgaggctggaatgatcgtaccgtttttcagtaagcgcacgtttcagctgttttgcctgctctttcaggcgtttttcatttttggcggacagaacgaaaagacatgggtcgatatgagaatcatctgcttcctctctgtcttctggaatgtattcttcgatgacgacgtgggcatttacgcctccgatgccgaatgagctgatgcccgcgcggcgcggctgttcgtttccgcgttcgtccgtctgcgtcttccattccatcgtctcccgcaccagataaaacgggctgtcttcaagctgaatatacggatttaccgtctcacagtggagacttttgactaatgtgcgatgcttcatctgcagcaaaattttaataatgcccgctgctcccgcggcaagggataaatggccgatattcgttttgaccgaccctaagccgcaatagccggccgctttctcttttccgtctgcaaacgagctgaacgcttgtttcaggccgttaatttcaacgggatcccccaattctgttccggtgccgtgcgcttcgatataagagactgttttcggatcaatgcccgcttttttatatgcggctttaataacttccgcctgttgtttcgggttaggcgttgttaaagatgccgcacggccgccgtgattcaccgcgcttcctttaatgacgccgtaaatatggtccccatccgcctcagcggctttcagctttttgaggaaaaagagcccggctccttcaccatgggcaaaaccgtcagcctgatcggagaacgtcttgcatcttccttctttactcagcgcgcccgctttgtcaaagctgatatacacatccggaagaacaatcgtattgattcctcccgccaaagccatgtcgcacgtcccttcttcaattgaagaaacggcatggtgtatggcaacgagtgagcttgagcaggcggtatcaatcggctcgctcggcccgtgcagattgagcgtatagctgacacggttcggtccgacagacggacttgtattcgccgcggatgacccttcaatcgccgcatcggcattggctaaaagagaaccgtagccggtgtttccggtcccgataaacacacctgtctttgtgcctgagagactctttgacgcatatccggcatcttcaatcgctttccacgcatacgtcagcaagaggcgctgctgagggtccatttgctccgcttcccgcggtgaaatcccgaaaaacaacggatcaaattcagcaattccgtcaataaacccgccttggttgacgtttgttttattggcttcttttgcgggatccccgtaatagtcccgccagtcccagcggtctttcggaatctcggtcatgcagtctttgccttctttcaggttctgccagaaagcttcaatgtcttctgccatcgggaaaatcccgctgatgcctacgattgcgatcggttccggcccttggtcccgctgcactgtctgcggaagtgtctcaggcagagtgcggcgtcgcttaacggccgggcgcgtaatttgagtctcttttaccggtcttgccgattgaatcgtttttgtatttaccgcaaaccgtccggcaaattcctcttcgtattcactgattaaatgaacggcaaattcatggattgtcggatgatcaaagaaaatcgtcggcgttaacgtaagccggtacgttttgtttaactggttcgtaaactcagtcatcgagatagaatccagcccgtattttgtcatttcttcatgaggatcaattttgtcaatgtttacttttaacagcgaggccgtctgctgttttaacagatgcttcactttttcaagcaggctgtcagcatcaatgtcatgacgtacgccgatctctgcttccggatgatcattctctttgcggaaccgttttgctttcatgtgtttcacatctccttcaaaaaccgtcatccgggctgtcccgctcatcaagccttgatataaagccttgatgccggcatctgtgctgagcggtgcgattcccgcctgctgcatcagcatatcttccgtctgctttcctgcctgcattccgccttctttccataacggccagctgacagaaagcgtctttccgtatctttgtcctgcggcttgtaaagaacggcggtactcggcatacatctccataaaaacatttgcagacgcataatcagcctggccgacgcttccaagcacacctgataaggatgagaagacaataaagacatctaatttctcatgttgtgacgcttcatcaagatacacaaggcccttcactttcggagcgagaacgtgttggaattcctctgccgtcttcttcaccatgtagttgtcttttataatgccggcactgtgaacaatcccgtccagcttgccgtgccgtttacggatattgcggatcaatcggtatacttctgcttcgtccgtgacatcggtctgctcgtagaaaacagaagcgccggcagcacgtactgtttccagcatgtctttctgcttttctccgagagcggaccggccggttagtatgatgacggcgtcttttgtacggtttgcgatctcttttgcaaaaatcagacctaaacctccggcacctcctgtaatgagataaacgccttcgtctttccacggaatgtccggctccgcttgagaaatatccatctcttcccaatcagcggcaatgcgcttgccgttttcatatttcacatggacgctttcggcatgcatacggttttccgccgctttttccgcgatgccttcagcactttctttctcctcgacttcgatcatttgacagatcagcttggaatgttcaagacatgcggttttgaagaggccggtaatgcctgagaacacctgctgtaagcctgctgaccgcgtaacagcctgaaaaagaacgcggcccttcggcttgcttttcattatggttttgatatggccaaacagctgacccgcataagaatgataccgctctgcaatagatgcgggacgatcgtccaggataatgacgcgtgcatgttcaagctttgcttcgacagcttgtttaacggcttcatcgtactcacaaaggaaaatgatatgctcttcatacgaaggcgcatgatcggccggtgccgtctgctctttccagaccggttcagcgaacaatgtgtccgtacggctgaccgaaacgccggcacccgcgttttcttccatgatccgcgttgagaaacctctcatccgcacacaaagccagccgttattgtcatataaatcaatatctgctttttggataggatcgccggctttattgttcgcactgaatgtgacgtgcacccacatatcatcagcgcacggattcagaacgtccagctcctctaaagcaaacggcaatgcggctttgaatggttccccgctttctgccagcagcgctctcgtcacgttttgcaaatattcggcggcctgaagcgcaccgtccatcatactcggatgaaggatataatcagctttcgtatgggagagggattcaggaagcttcaatttagcaagcagccggtcttcgcctttgtatacaagctggacacctttatagccaggcccgtaatcagctccgatcattcctttgtaaaacgcttgagattcgattgttccctgcgtgcaccggcgcttcagctgctcaatatccgccgcttcctccggttccttccggatgatttcagcgatgccctgattataaagaggagcttcttcaccgatagaatcgttaccgccgtacattctgtattgaatctgtccgtccccttcttcataaagtccgatatggacacggacagcgtcctgatcgactatcaccgggcggacccatacgatattctttaagcgcaggccgagagaatcctctgttgccccgccgatgcttttctccgccgcggcccgtgccatctcaagggtgacggcagccggcacgatcgccattcctttaatgatatgctcggcaataaaatactcttttcccgtaaattccgaactgaaccgctgctcctgcaagacggatgtattctgatgtaccagcggatgcaaaaacttcgcatctgtttgcttcacagtttcttccggccagaagcgctcctctgcgaacgggtaggtcggcgcactgattcttcgcggcgcggaatcctgatacaataagccccaatcaacacgcgctccttcaatccagagcgccgcaagtgctttcagcttttcatcacgtgtctgacatgccgcaagctcttccatctcctgagccgacacttctctgcttctcactttttcgccccgtaagatgttttggtcattgccgttgatgaaatcctgcagctgacgcttcagatcgtgacgatcatgactgataaaaacggctctctcttccatcgcttcacgtccggtctgatacgtaaatgccagatcatgcaaggaaacatcgttttcggcttcatccagaaagccggataaacaagttgcataggcagtaagacgttgcttatttctcgctgacagcggaacgatataaggcggctgtccgtcatttgatccgctgatcgttttgttttcatactgttcaaaaatggcgtgtgcgtttgttcctccgagtccgaatgagcttaacgctgcccggtgcggcgtctctctctccggaagcgattttctcttatccgccacataaaacggcgaaccgctgaatttgatattcggattcggtgacgtgtaattaatggtaggcgccagctcccgatgatataaactcatggcgactttgatgcacccggccagacccgctgctgtatccaaatgcccgatattcgtttttacggagccgattccgcaatactgctcccggtccgtgtaacgtttatacacttgctgcagcgcggacatttcaatcggatcacccaatgtcgttcctgtgccgtgcgcttcgatataggaaatcgtctccgggtgaatattcgtgctgtctaaaacatgctggatgacgtcagtctgaccttttacactcggtgcgtaaaaaccgactttatccgctccgtcattgttcagaccgatgcctctgagcatggcgtatatgtgatctccgtcctgaacggcttgcgacgcctttttcagcagaatgacggcagctccttctccgcccgccataccgtcggctgaagcgtcaaatgccttgacatgcccgtcgcttgaaaaattcaatccgttttggtgcacatagccgatgcttgtcgctgcatgcagcgttgctccgccgacgagcgcgtattccgattctccgctcgtgatgcttttataggctgaataaagaccgactaatgatgatgagcaattggaatgaacgaaatagcttggcccttttaatccgagcttatgggaaaccatcgtcggaatcgtgccgctctgcgctaacacccatgagacatagccgtcaggagattcatggccttctgtcgttttttccggtaaaagcgaccgatacgaattattgcttgccgacatatatacgcttgtcttcggaatctctttggatacatatcccgcgtcctcgacggctttccaagaatgtagcagcagaagccgaagctgaggatccataaattctgcgtctttcggagaaatgtgaaagaactcagggtcaaagagatcttttccttctatcgtcgataatgccggcacatagtcgggattttcgatcaaatcttcaggtacgccggcttcccgaagttcttcttccgagtagaaccggacgctttcctttccttctcttaactgcttccaaaactcatgatgatttttcgcgccggggaactggcaggaaatccccactatcgccacactgtcgtcaaagtaagacggcaccccgttttgcggtgtttgttctctttctctctcatcttggcctgatgcctctgattcagccgcctgtttagtttcaacaataaatcggctgatcgcctgaatggtagagtgttcgaataaatccgtgacggtaaaatcgcattccagctcctgtttaatgcgttctgccgccgcaacagccaaaagcgagtcgcctcccacatcgaaaaagccgtcttcggttttgatgcccgccgtattcagcaggtcttcccatattgcggtcactttcgcttccgcttctgataacggcagtctgcccgtcttttcagaccggtgaacaattaccttgcgctgttttaggtctttgcggttcacttttccgctcggtgttaacggcagcgcatccagacggataaaatgggcaggcgccatataatccggcagactcgataaaagatggttgcggagcgctttttcatctgccgtatgaccggagcgggccgtataataagcaatcagctttttatgtccgttcttttcctgaacaacaaccgcctgatcaagaatgtccggatgttcgttcaatttcgtttcaatcgctcccaattcgatgcggaagccgcgaattttcacctgactgtcaatccggccagcatattctatatttccgtcaggcagccatctggccaaatcacctgtcttgtaaagcttttctccttcactaaacggattatcaataaatgatgccgccgtcagctcaggctgattgtaatagcctctggccagaccggcgccggccacgcaaagctcgccggccacaccgtcagggacggggctgagcttttcatcgacaatataaagccgtgtattttgaatcggtttcccgatcggcgtattcctgcttgtgatttccttttggccgcagctgtagtaagcggcataaatagatgtttccgtcgggccgtatatgttttcaattctggcatgtttgaagatggaaacggccttttttactaaatctttcggaaatgcctcaccggccaccatcacatatttcacagggccgtcttctgtaaatgccgtatgccgctttaccgtttccagaaatacattaaacacggcgggagcaaaattcagatgcgtgacctggtgggtttggatgtattccatacaaagctgcgggtttttttctgcaccaggcggcaaaatgacaagccgtccgtttccgataaaccagccgaataattcagaaatcgaaacgtcaaatacgtaattcgtttttaacaaataggcatcctcttgcgcgaccggatactcagcttccaaaaactgcagcgtattcatgatggccctgtgctcaaccatgacgcctttcggttttcccgtgcttccggacgtatatagaatataagcgagatgatgcggttttgaacgcggcgtcagttttgccccgctgacagaacgtccgctcttttcaatttccaccgtgctcacaccgccgacggccaactgttcaatcatgccgcgcgtatttgcttgcgttaatacgattgaaacgccgctgtcagtcaacacgtgcgccatccgttcgtttggaaaagccgggtccagcggcacatacgcgcctcccgcttttaaaatggcgaggatgccgatgaccatctcaaaagaacgctccgtacaaatgccgaccgggcattccggtgtgacgcccttttcttgcaggtacacggcgagcgccgtgcttcgttcatctaattcgcgatatgtaagactgttttcaccgtatgtgacggcttctctgtcagggtggcgtccggctttttccgcaaacacttcatgaatgcagcgctcattcggctgatgagatcggcttgcttcacgtttttgattgagcaggccggaacaggcttcaaaagcgatctccggatcagaaagcaccttttctgccagtttcatataatgctccgccatccgttcgatgaaagaagggctgtagacatccgggttgtacagaaattgcaggacggttcccgtttcttttttatagacttcaagcgcaagctcaaattcgccttcctgatgaatgtcttctatcatttcaatgccgagtgattgatatagttccgccagcttttccgctccttctgtccggaagaagttttgatagaaaaacgcggtttgaaaaacaggcgaaaccgcaggcgagcgttccgtcttcaattctttgacaagcgcgggaaacggatacgcggcatggtccagcccttctgccagtgtcagctgcagctccttcaaaaacgccgtaaaggatttggcgcccgtctccctgcttctgaccgcgatcatattaataaagtatccgatgacagattcaaattgagcctcagagcgccccatcgtcggcatgccgacgatgacatcttcctgattcgtatattgatagagcagccctttgaaaatagcgagatacacaacggattcattgacattatgtttttgggcgcacactttaatctgccggttcagttcatcaggaagcaagcgctgatacgcctgccctttgcaagtttgaaccgatgatctcggataatccgacggaagctcaagcaccggcagcggtccttccagctgctttttccaataagagagatgcgtttttcccgcttcgctttccagcagctctttttcccatttcacaaagtcatgataatctgcggcctgctgaaccatgacaggttctttgccttcacttgcttttacataagcgtccagcagcgccgacataaacgtcataagagagacgccgtcaaaaataatatggtgaatggtgattaacacaatcggctcccgcttcgcccgccggaatacatgaacacgcaggagcggcccggtttcaagcgcgaacggttcttttgctttttctttaataaacgaaagagcgtcacgcccgcttaattcagaaagatccatttcttcaatcggaaaatgccgatccgtatcttctatctgatacggaaggccgttttcctcttttatcacactggtcaaaatagggtgctggcgctgcacggacaaaagggcgtttttgaatgtctcgatatccagcttttgaaaacgaaagcataacggaatgttatatgcgctcatctccggaaacattttctgaagcatccacaaacctttctggccttcagaaagcggacgttttgcagttgtccgcttgaaagcctgaagcttttgttctacttcagcgatggtgagcgttcctgatctgtaggcatcgagaagttctttatgattcataagtcttactcccttctatgatgtcttgcactcttttaaaatctaatgtcccctcagagacctgtttcatcatggcgatgatctcctgatccgtgtactccttgttacccggagcggcggcttttgtttcagtttcttccgttcggtaaaacgttttgatcgtttctttgtgttctgtcaggtaatagctgatgacgtctccgagcgtggcatagctgtaaaataaagccggagtgacttcaatgccgtaatgactcgacaaaagagcggcaaatttggctaaatagatggaatcaaatccgaattccgcccagtttttatgcaggacgagtttatctttagatattttcagcagactgtgtatcagctctttcaaatccgcttcgagccgtttttccgtgctttcttccgggatgcggcggctcacggtttccaaaagcgcatccggttttgatgaatcgtcccgccgtatgcctaaaaatcgttcggcgcggcttcttttgccggcaatgacaaggcactgggtgttgtcttgagaaatgatgcgctcaaacagctcaatgccttcatctgtttctaacaggcgctgtccgcttgattgcaggtacatgcccgtcgtctcttcaccgccgacggccattccgccgtttttccagaccggccagtttatgacaaaagcgtttccgctttcggattgttcgtttttatagcgggcatacgccatttggaacctgttcgcgaccgcgtaatcacagcatccaaaatctcctaaaacagcagatgtggatgaaaagtagcagatgaaatcaggcgtttcgtttttcagccactcgtcaagaagcaggctcccgtttattttcggttcaagcgtactgcggaaattcctgatttcattttcaaagacggatgttctgctttcgatgcccgccgcatgaatgacgccgtgaatagctccgaatcgttctttcgcgcgcttgatgcagtcgcccattccgatcggatcacaaacatcggcttcggcgtaaagaacacccgcgccgagattttccaggtctttcattttttctttcttttcttcattgatcggcgaccgccccgtgagaatgacatttgcctggtagttccgggcgagatggcgggcaaataagtagccgagccctcctaatccgcctgtaatgagatatgttccgccggttctgatcctgccgttttctttcgttagtccggttggttcggtgtgatagacatatcgttttccctcttccaagaaaacggtatggtctgtttcagctttcagctcgtcccaaatggttctcatccagtccgttatggccgcgccggcttttcggaagtggccggtaacacttgttttcggaagaacaatgccgagcgaacgctcaaagccgatccatgattccaagtagcacctttccagaccggatgcatattcccccgccaataacagcctttccggctgcagaccggtctcagccattgctttgagaatatggacaatacatgaataatcttcgatgcagcttttatcttcaagcgcccataaatacaaaatggcagaagcttcaccgtactctttttgaatatccgcaaaagcgttcacatatgattgcggatcttcccgcaccacttggcagcggccggcggacaaggcctcataccggtctccctgagcgataaaaataacgtcaatgtcactgtcatacgatttgatcacagagacggcttcctgctgcttcttctgatcagttaagaaagaaatcaccgttttgacttgcttttctccggcagccggcagagcctgttctttaagaacttctctaaaagccattacttcaaactgctccgccggatcactttcatcagccggcgccttaacgggcgcggccttgctttgtacaggctgctgatgccagaagcgttctttcgcaaacggataagcaggcaggctgatgcgggccggaggacggtctccgtataatttcgcccaattgatgtccaatccttttacccaaagctcaagcagcttagaatatttccgtttgctgatccaagcgtctatgatggtttccatgtcatcatcggccgcaaatacggcaagcatccgtttgttttcttccgtgccgtcacggtgcagtccggcgctgttttgtccggcgataaatccgttcagtttttcctcaagttcatgaagtgaatggacgataaaaccgagacgctcttccatcggcacccggccagtctggagagtaaaggctatgctcataagatcgcggccgctgtatcttttttcacggatggcgtctctgagctgttttgctttttcagtgagccgttcgctgtttttcgcggacaggacgatgatggcgggctgatctgccggcgtctcatcaggctctttgtctgccgtatattcttctatgatgaggtgggcgtttgctcctcccgcgccgaagctgcttaaccccgcccttctcggaagctctttgccgccgatgacgggacgtttccactcaccgagctcctgctgaacggcaaacggcgtatacgcgaaatcaatatttgggttcagctgttccgcgtgcagggacggcgcaatttggcggtctttgagctggaataatatttttgtcagacccgcaatgcccgctgcgctttcgcaatggccgatatttgattttgctgagccgatggcgcaaaactgtttgtctgttgtatcctcatcaaatgctttcgttaatccggcgatttcaatcggatcccctaatgcggtccccgtgccgtgggcttcaatataactgacggtgcgcgccgggacgtttgccctttcgaaagcttcttttattaaggcggcctgcgcattcggattcggaacggtgtatccgttcgttttgcctccgctgttaatggcgcttcctttaatcacaccgtaaatgtgatcgttgtcggcaatcgcttgctccaacggctttaatacgaccgcgcccaccccttctccgtctacaaaaccgtccgcgcggtctccgaacgatttgcacgtgtcgcttgcggaaagcatgttcatgactgacagattcatataatgaatcgggtcggtcactatgtttacgcccccggcaatcgcgcattcgcttgaaccgctgtatatgctctcaagcgccagatgaatggctgtcaaagaagaggagcaggctgtatcaacggcaatgctcggcccttggaaatcaaaaaggtaagataccctgttggcaatggaccagtagccgtagcctgtcgggtagtttttgttcatcgcgccggcaaaaacaccaatttttctgctttggcacaggttgtcaggcgtatagccggcatcctcgatactcgcatacgccgtttctagaaataatcgctcctgcgggtccattcgctccgcttccaaaggagaaatctgaaagaacagcggatcaaacttgtccatatcctcaatgaagccgccccatttcgtataaatagagccttctttacctttctcttcatcgtagtaatcctgccagttccagcgttcctgcggaatttcttctatgcagttttttccttttttaatattggcccaaagctcagccgctgtttttgcctgcgggtagcgtcctgaaacaccgatgatggccacgtcgcgaaccgaactttgccggacggtctctctggctgcccgcttttccctccgccgccagtcagtgcgaagcggcttggccggctgtacagcctgcggttctggtgatgccttccgttcttcctgaacaggcgtttgtcccgtcagtttgatcatcgcgtcttttttcgttttgattaagtgagcgacgagcgcttcgatcgtctgatattcaaaaaataaagtgctgctgacttggtccaatacatttcgtaacgcgtttgtcagctgtacgacgacgatagaatcaattccgtatttttcaagcggcgctttcggatcaatttgagccggcggaatttttaacgtttctccgattaacgttttcaagtactcggtgcttttttctgttaaagacgtgtcgcctttttgcaccgttgtttgcggcgctttaaattccggcgcttgtgctgcttttggcggagcggtccgttttccggcccctgctttaagcgttttttggcggacaacgccgttgctttttgccgctataatctgatggcttaattcatgtgccgcttctgccgggaagaagacagaatgccagccttcactttctaacacgcgcttccagctttccggatacaagcccgggcaccccggaatacgaagggcagaatcttcatgcagccaccagccttcaagcagtccgaaagtaatatgcgggaacaggctgtttcccgccatttcatttaagagcagcaaaccgttgtcttttaagacggctttagcgtttctcagcgtctggcggatgtctttcgtcgcgtggagcacattggcggcaacgacgatgtcgtatgcgcccggctctatgtcctggccggcaagcggcgcttctgcgttaaaaagcttatacgtcagataaggattccgtttgccgtattccgtctccgcatgcacgagaaaagctttcgatacatcggtgtaacagtattcttttatatggttttgatacggcctaagcttttcaaatatgcctgcgcttgtgccgcctgtgcccgctccgatttccagtatgcggatctcggcttttgaatgtttgctgatgttttctttcacataagccgttaatgtttctgacagggcgctgttaaagtaatccgcgacttgattgtgcttataaattccttcaacaagttccattgaagagtgcgggaacatgatgtcagtcgccggcacgtcttcgcgcagaatgtccggcagtgctttaagcatcgtctcggctaaaacagtcatcgcttttgtatcggcgttattgagccattcctctttttcctgctcccatttttgccatagcgaggcggttgtgtcttcggcacgggccgacagtttatatgaatccgcattcccttccagataaccatgttccagaaggaaagcgatcgtttgattgagccattttttaaaatattcgtgttcgggctcatacgctttaaggctttgcggcgtcagcaagtctgcttctttaagctgggcgatcaaaagccgatacagaaaatcatcgagcttttgatgttcagcctcttttacaagacgtgcgccgggcggagcggccttcagctgttgtgaagagacaagcggctgagacggataaacggaaattttttctgtttcactcatcccttcgactgcgaccggttttgtcgtatgaatgaaagctgcttgatcaaccggcagcgtcataagggtttcaagcgcctccatcgcagcgtccggttcgatcaatcccaatccgatctgatccatcagctgaataaaatcgccgtcttcagccgcttcgctgttgccccaatagccccaattcatgactttgaccggacaattccacgtctgatcaagttctttcgcaaatgcgtcactgaaagcgcatcctgcggcatagtggctttgtttcacgttatggataaatgccacaagcgaggagaagaagagcgcaaagtcaagcggctcccgtccaaatacctccgccatggacacactgacatcggcttttgcccgcagcaccgatttgaactcttctgtcttcatattatttaagctttgctcagacagatccattgccgagtggatgattccgttcatttttgtgtgacgctcttttatgaactgataagcccgctctaaggaagcactgtcagcggcatcggcggaaacatattcaggcgccgggccgaatgcgctgagccggtcgagtttcgcctgtatggaatcattcagtgtgcttcttccgatccaaatgatatgtgctttgtagcggcggatcatgtattcactccatgcctcgccaagatatccggcgcctccgatcacggcataaaccccgcctgtttggtacagcgtgccgtttttcggcatattgtcaagcggtatcagctgccgctcaaacagctgctgattgcggtacgcccaaatttgaccgttttttccggcagaaagactgagcgcctctttgaccggccagctgccgtccgtttccgtgtcaatcatgcggatattccaatgcggatattctttcgccattgttccggcaagtccgctgactgcggcctgtgacggggcggcgctgtcttgatcggaaaacggctgggcatttgctgtgacgatgcaccagtccaaatgtttttctccgtaccccaaggcaagtaatgctttcatcagcttgaacacatgaagaacgtttctttcctgttccttgaggctgcaagcactctcagcctgcggagcaagccaaatgatttgctccagctctttttgtccttcaagcatgtacgtaagagatgtgatatcatccgtacctctgatcggataataggaagcgttcggcagatgttcttttatgcgcgtatgcgttctgtcagtttcaccgaaaaccgcagtctgcttttccgctgtttttgctttcttcgttttttcaagtgcaacgggctcccatgccggaatcagcatcgtatggccgacaggcgcttccggggtttctccgcccgctgtttggcctgtgtcaagcgcccggacggacgcgcctttcatccggacataaaccgtaccggcatcatcgcacatatcaatgtcaaattttcttacgttgtcatctgctttgctgccttctgtgtaccggatatatgaccagatatgttcaggacacggcccgaacacttccacttcctgcatcgcaaacggcagagaaagctcgtggctgtctgcatcgtcatgtattgagcggacaagcagaccgacggaggcgtgaaaagcggcgtccatcatactcgggtgaagcgtatactgttctttattgtcatgtacggcagccgggagtgaaatacgggccaataatcggtcttctccgatcagcaattgctgtacgcctctgtatgcctctccgtaatccagaccgatcttctcaaaagcaccgtaacattcttccgcagtcacggtccctgaattgcaggaagctttgacagactcgatatcaatctgggcgctttccggttcggtaatgaccgcttcaccctggctgtgaataaccggatcttcgccgttttctgcctcactgtatatttcataggtaatctcaccattatcttctgggtaaagggcaatatgtatttccttcggtttgtcttcaatcatgaccggccggacccaaacaacctgcctgagtgtgacgctatggtctttttccgtcacggcagcagcctttttaaccgcctctctggccatttccaaataggcaacgcccggcagtattttttgtccgttgacgacatggtcagataggaaaaattcatctccagtaaaaagagacgtgaagcgctgctgcgaaaaatctgacgtgttttcttgtaaaagcggatgcagcactgtgcctgacgggcttttctcctgttttttctgctgcggaatccaatagcgttcttttgcaaacggatacgtcggaacgcttgttttacgcggtttacccgaagcgtacagcctattccaatctattattttcccttctgcccataactcggcaagccgtatcggatcatccgtctcgggagcggtttcgctcagttccggcagctcggcttgtccgcgccaaagaccggggatgttttcgtttccttttacgaaatcattcagcttttctttcaagtcgcggatgtcatttacaaggaagacagctctctcttccattgcttcacgtcctgtctgaagtgtataagccagttcagacagcaccgtcttttctgaaagcgatcgggctagtttttccgcataggccagaagcctgtctttatttcttgctgacagcgggatgagttttgctgcattgttctcaggtgcaggcgctttttgttcaggctgaatgtattcttctaaaatgatatgggcgttcgaacctgatgcaccgaaggaactgagtccggcccggcgcggataatgtgtgacttttccgttttcttcggctgccggctgcttccacggagcagtctgctgctgtacgtaaaaaggagatccctcaaatttcaggtaaggatttaattccgcagaatgcagtgatttgacaagcgttttgtgatgaagctgcagcgccgcttttgttaacccgctgatccccgccgctgattctgcgtgaccgatatttgatttgaccgaaccgatggaacaaaattgctgatcctgcgtcccttggctgaacgcttttgacagaccttcaatttcaatcgggtctcctaacgaagtacccgtgccatgggcttccacataactgacggtccgcgggctgatacctgcttttttcagacaggccttaatgacttctgcctgtgcagcaggactcgggacggtaattccgcttactttcccgacgtggttaacggcgcttcctttaatgaccgcgtaaatgcggtcgccgtcttgttcggctttttccagcggcttgagcaagaccgcaccgactccttctccggaaacgtagccgtccccgccctcgccgaatgtgcggcagcggccgtcacttgagtgcatccctacgcttccgtagctgagatatttcgccgggtgcagcgacaagttcacccctcccgcaagcgcggcttcacattcgccgcggcggatgctttcaatggccagatgaacggcggtcaatgatgaggaacaaacggtatccaccgcgatgctcggcccgtggaagtcacaataataggacactctgttggcgatctgcgcataattcagtgaaaccggaaaaggatcagcttcagataattgttctgcgccgattaaggaataatctttatgcatcacccctgcaaatacgccgatcggatgctgtttctcccctttattccccagcgtttcaggcgtataccccgcatcttcaatcgtttcccagcatgtttctaaaaacaggcgctcctgcggatccatcgtttccgcctcacgcggtgagattctgaaaaactgcggatcgaaacagtcggcatcgtcaatgaaaccgccccattttgatactgtttttccagacggggacgttacgttttgatatgttttccaatcccatcgggacttcggaacttcagtgatgcaatcggtgcctgccttaaggttttcccaaaactccgccacacttttcgctttcggatagcggccggccattccgataatcgcgatgtctccggtgtttttatgatgttctggcgcgtccggcgcttcagcttcagatcgtgatgattcggctgcacgttcctccgcatattcaaatgaaccagtctttttcagaaaggctgcgagttcttttatatttgtatattcaaagagaagagtgggcgcgaggtcagcacccgtctttttactgatatcctgtacaatctcaagcaaagaagatgaattcagtccaagctcgtagtagcctgcaagaacgtccagcgtctcccaaggttgcccaagcttatcagccaaaagcttctttaaaaacagaatgatgtctttttcatctgcgctttccggctcagctgcagcctgttgattctgttcggctgtattcgcgtcttcgagccgaaccgcttttcccgtaatgtttttaagctccgccaccttttgtccggatcggctgaagtactcgatcgtcatcgttgtgagttctttttcctgacggacgccggaagcggcgatacgcgccgtgcactctgattgaagcctgtcagcggccgtgaacgattcataatataaaggcaggtgaagccggtttgtttctgaaagcaaaccgctccccccgattccgctcgcatccaaaagggccggatggaataaaaagaaatcttttccttcttcgcaagaaagctcagccagcatgccgctttctgtttcgtacaattgtccatttgatttcatcatgccggaatgaaccaagtcatgatccagacagcggttatacatatcatcaagattcagagacctggctgactgcttcacatcgctgaaatcaatgatttcgtcaaatgtgacagcgtctcttttcaccatttcagccgtcgcatattgtatattgtctgacagctcgtcaccttgctgtttctgccctgaaagggagatgagccactttccatctccgctatcagaacattgaatggtcagaatgattgcagccgtttcactgacggttaaaggctgataaatcgtaacgtgcttcaattcaagctcattgtatacataaccgtgttcctgaaaaacctgataaatcaaatcgatataagcaagaccgggcaataccgcttcaccaaagaccatatggcccttcatgatgggatgatccagtgagatattgattttttccgatatcattccttcccactcctctcttatttaaatgctttccaaaacatttttttcgcaggaagctcttgtttctccgctcgtacgtcaggttcttttaccagagccttacgtcttaatgacggtaccggcagcggctttcttttcattcgggtatctttttcttcccaagcttccagaatgacgtgggcgttcgttccgccgtcggcaaagcagttgatggctgctgacggtctggctgcatcccattcgccggctgttttatgaaagtgaaaatctgtctttgttatatcaaaatgcggcatcggttcgtctcctgagagaaacggaaccgtttgtttatgcttcagcattaatacgactttaatgaagcttgcaatgccttctgcgcaaagcggatgcccgatgttcggcttgattgacccgatgccgagcggaacatgctgacctgagcggtatacggattgaatcgccttcagctcaagcaaatcagtcaccgcggaacccgatccgtttgcttcgatataagtgatgtcttccggctttttgccgcttttgagaagcgcgctttgcataacgtctttttgcgcctgcatattcggggctgacgggcctgccgttctgccgtcattgttcatggcggcagccttaatgaccgcgtgtatcgtatcgccgtctttttgcgcctggcttactgtttttaacagcaccatgccgacgccttcaccgaggaccactccgcctgaacgcttgtcaaatacgtgaaatgccggtttctcgtttaacagcccgcgctcttggaacatccggtgcgccgcatccgtgttcagcaggctgacgccgccaactaccgccgctttgatatcgccgcttctcagtgcctgaacggccatgttcattcctgtcaaagctgatgaacaagccgtatcaagcacgatactcggcccgcgcagatcaaaaaattgcgaaacgtttgccgctaaataattctgcccgcccgcaacaatcgggttgcgggtattcgcaagactttcaggatcaggctgatgctggctgcggcctccgatatacacaccggcttctatgcccttgatttcttcacgggtatagccggcatggcaccaaagtttcaagctctcttccagcaccgccaacgcctgagggtccatcgctttcgcgtcgttttccggaatgaaaaagaattcggaatcaaagtgatccatattgtcaatcaatcccgcaacatattgatttgcatatccgaaacgttccgccgggacggagccgattgcggacctgccgcttctcagcaagtcccaatattgttctaacgattccgctcccggaaaacggcagctcattccgacgacggcaatgtcttcagttacagcagcacgcttttgctcagtgtgaaccgtttgtacggcagccggaaccaacatttccgtatcaggttcctccctttctgcaagcagcggctgcccattggatacaagccattcggcaaacgcgtcaatcgtcggatgttcatataaaacagacggatctaagtcctctttgagcgcttgattcatttgctgtaaaagctgcgctaaaatgatcgaatcaaccccgtaatcctgaaacggttcgtctgtttccagatcttccggagcgattttcagctcatcggaaaacagtttcacaagccatgccttcgtatcaagaagcagttctctgtctgaatgtttttccgcgtctttgccgtttattacggcttcagtctctttttgttttttctcttgacagagcagcctgtcgggatgccattcgctccgatcaacgatagccggcagaacggacgggcggatgttttcagataaaatgcggtccagcaagtcaagtccttccgcgttggacagtcccagcagcccggtctgcttcaggttttctgtgcggatttcacccaatccggtttccttccagttcggccattgaatgctgactaacggatattgatgctgatgagccgccgcgaaataatccatgtacgcatttgccatcgcataatccgactgtcccgccgcgagtgccggaacgactgcagatactgaagaaaataagacaaaaaattgcaaaggatcatttgtgaaaaggctgcttaatgtttgaagcccggcgactttcggttcaagcacttcttgtatgtcgtcggcagtctttctgataaacgccggatttactgaattaaccgatcccgcacagtgaatgacgccgccgatcggtcccatcgtgcgccggatcgtttcaatttccgctgccgccgcgtcatgatcagacaatttcagactgatcaccgccacttgcactccttttgcttcaagctcttcaatcgcccgtatcttctctctcagcctcatattaacggctgtccgtttatgacggggaggaatcggctccctgcctgtcagcactacttttttcacgccgtgtttttctgtgaaatggcgggcgcataagagacccagtcccctcgtccctccggtaatgaaaagcacatggtcttcaggaaacggtgctggcttatgttctgctcgcttcccgcttggaatctcgctgaacaaagcacggtatctttgtccgtttcggcggcagacttccggttctgtgctgtccgccgaaaattcatctgcaatctgtttggcaagcgtctgctgatccgtatctgtatcggtatccatgtgtctggacgtcacgttttgatactcattttgaagcattctgtacaggccgctttttgccgctcctgcaagatgaatcgttttctgctgaaatggctccaagccttttgttacatatagcagcgtcagcggccgcgcttgccggcggcttgtatcaatcagagtctggagccggctgatcccttccagtgaagggtcttcgtctccgcatcccgtcagatcgattacgccatctatgtgattccaatcgctagctgcagtgtcagcggccgggagaatgaacgagtcagcgaaatgcttcgcagtctcttcggcaagttccgctgttcttgcatcagccagaatcatgaccgtcctgccgcttttctcaccggccgaatcgatctcacacggaacccattgcttttctaaaagcacagccttgcgccggtcttctgtttcctgcggtacggctttcggctcaggcagccagtacggctccttcgcaaatgggtaagccggcagactgattctgcggggtttttcgccttgatagagtctgtcccagtccgtctgaagccctttggcccacaattccgctattttggcgtattttttcttatcgaaccacgacctgacaagctgcttcagatcatcgtccgtttcaaatgctttgatttctttttttgccgttttgatgtgggcttcatatatcccttcacccgtatttccgtttacaaaatcggttaaacggctgatcagttcttctctcgaaccggctgtaaccgcaagacggtaatccatcgcatcacgcccggtctgaagcgtgtatgccatatccgaaagattgatattctgattggcttttgcaaattcgatcacagactcagcataggtttttacctgcggcgcttttttcgccgacagcacaaaaatgtttgtctcatcagacttgcggcttccccggtctttcggctgatactcttcgataacgagatgagcgtttgtgccgctgtagccgaatgagctgacgcaggcccgccgcggtgctccgcctgtttcccaaggtttaagttcggtattgacaaataaaggcgagtcatcgaaatcaaaatgttcattcggcgtgctgaaatgaagggtcggcacaagctgctggtgcttcatcgacagcagaaccttctgtacgcttgctacacctgccgccgccgacgtatgcccgatattcgatttaaccgaaccgatggcgcaaaattgtttgcggtccgttttttccttgaatacagaagataaggcttctaattcaatcggatccccctgctttgtgccggtgccgtgcatttccgcataggtgatgctctcagggtggatgttgtgcgcttcatacacttgacgctctaaatccatttggcttttcgcgcttggtgcggtaatgccgttggtttttccgtcttggttaattccagatccgataatgactccgtaaatatggtcttgatcggcttccgcatctttcagcctcttcaaaacgagcgcccccgcgccttcgccaggcacaaatccgttcgcactgttatcaaatgctttacattggccgtcaggagacagcattccggcttcacacatgctgatgtatgattcaggcgttaaatacaaggtgacgccgccgacaagggccatgtcaatttcatgattcaacagcgcctgacgcgccaaatgagtcccgacgagagatgaagagcatgccgtatcgatcggaatggccggccctttcaaattgagataataaggcaggcgggccgccgcgatgctgaaactgttgcccgtcgcgcttcctcctgtctgatgtttgtttaacatcattccgtattcattgttcataatccccaaataaacgccgcaattttttccgtttaattcttttgagctgtaacccgcatcttcaaaggctttaaaaccttcctgtaaaaatatccggtgctgcgggtccataagttccgcttcagacggagaaatattaaagaacagcggatcaaactcttcaatgccgtcaagcataccgattgatctgcagtatactttgcccttcttgtttaaggccggatcatagtatttgtttacatcccagcgggaaagcgggatgtcgcggatagcgtttttcgcacgggctaagttgtcccaatatgcctttaggtccggcgcatccgggtacttgcccgacatgccaactatggctatcgcgtccgctatctcgtctttaggctcccgtttggcctgcaccggttcaggttccttttgaaccgttaatctctccggctcggcaggtgttttctcctgcggggcggcttgctgtgtaagcggctttggacgtacgggaaccgcctgtttttttctgccgcggacggacggctgcgtacgcagaaaatcggcaaattgacggattgtcggataatcatacactttcgttacgttacagtccgtgccgtaccgtttattgacggcctttatccattcaagaccggtaatcgaatccataccgaggtcaataaaggcctcatcaatatccacttcatgccgctccatgtacaatacatcagccagtgcttttgataactcgtcatgcaccgcttcaatcggttcttccggttcggcggaagctgccgtttcagacatcgcctccagaatatccgcttctgcttgtatcacatgctgcttatgagcgtttaaaggctgcagcagtatgtttgacggtttttttacggcctctgttttctgcggttcggctgcttcctcaaggatcggttctgtcccgagttctttttgcaagaaggccgcaaactggcggattgtcggataatcatatactttcgtcaccgtaagggacgtgccgtacgctttattaacggcctttatccattcaagacctgtgattgaatccatgccgatatcaataaatgtgtcatctgcgtcgatatcgtcggcatccatatataacacgtccgccaacctttccgttaattcggcacttactttttcagcggataccgccggacgggaagcagactgtacggttcttttcggtttcgcgccgctcaaaggctgcaatgaaatgtttgacggtttttctttggcagtctcctcgtgaagagttgctacttcaatgaccggttccgggacggccgccggtgcgatcggcgcagactgtgtttcggccggtcttttgacagctgcatcagctgatgtgtcgatccaataacggtcttttgcaaacgggtaggccgggagactgattttttgcggtctgcccatttgatacagcttatcccaattcagcggaaggcccttcacccaaagctctaatacctttgcggctttgcctttttcaagccatgcctcaatggttttttccatgtcctcatcagccgcaaacagcgccatcgtgtctttattctgtttgacttgtccgcggtagagccggtcaattgactccttgccgcccgtaaattcgtcaagcttttcttcaagctcgcgcaaattgctgacaatcattccgagacgctcttccatcggttcacgtccgatttgaagcgtatatgcgatccggctcagatccgcttcttggtaacgcccgctccgcagcgcatcaagaagacgttccgcccgtttttgaagcctttgttcatttttcgcggaaaggacgatcatcgatggatgaggagcggcaaaagccgtctccttatcctcatcagcggtatattcttcgatgacgatatgagcgttgacgcccccggctccgaatgaggaaagccccgcggttctcggcagttctttatttattccgttttcatttatgaccggtcttttccactcttcaagcgtctgctgcactataaacggcgtagcgagaaaatcaatattcgggttaagcgtccgggaatgcagtgacggtgcgagcttcttatgtttcatttgcaggagcaccttcgtcagacccgcgatgcccgccgcgctttcacagtgcccgatattggattttgctgagccgatggcacaaaactgtttatcttgtgtttgttctgaaaaggcttttgtcagacccgtgatttcaatcggatcaccgagtgaagtcccggtgccgtgggcttcgatgtagctgactgccctcggatcggttcccgcgtcttttaacgcctgtttgatcaccgcggcttgggcgttcggattcggtacggaatacccgtttgtttttccatcatggtttacggccgttcctttgatcaggccgtaaatatgatcaccgtccgctttcgctttagaaagcggcttaaggagtaccgctcccactccttcaccgggcacataaccgtccccgccttcaccgaaactttcacatctgcctttgcttgataaaaatctgttctggccgagcatcaaatatttattcggatgaacggatacattgacgcccccggcaaatgctgtctcgcattccccgttccgcaagctttggcatgccagatgaatggctgttaaagaagaagagcacatcgtatccagcgccatgctcggaccgttaaaaccgaatacataggaagccctgttcgcaattgatgacggatttccggtcagcgcaagcgattttccgcgcgcctgttcttcggctccgtaaagctgatattcctcatacatgacgcctacgtaaacaccgacattggcgccaagcaaatcacccgatttttccgtgagctttttgcgcgtgtaaccggcatcttccatcgtttcgtagacacattgcaggaataaccgctcctgcgggtccatcaattttgcatcccgaggcgaaatagagaagaattgcggatcaaatttgtccacgtctttcaaaaatcctccccattttccgtacgtcttgccttctttatctttatcagcgtcgtaataaagactgtgatcccagcgatcgtttggaatttcagttatgcagtcagtgccttcactcaagttcttccaaaattcctgaagattttcggcttgcggatatcgtcctgatataccgataatcgcgatatcttcacgctccgtcactggatttttccgcgtgtctgtgcggacttgcgcaaagccttttttggcttcattccgtttggaaacgggctttatttcggctttttcagacagcgccggtttggctgcagaggtttcttctgttttcagcccggtcacttccagcagcgtgtcccggtgtgctttcataaaatactgcgccagcgattcgatattctgatattcgaaaaacaatgtttttgacaatgaaccgaagctcttttccagccggcccgtcaaatgcataatcataatcgaatcaattccgtaatcttccataggcgccttggcgtcaattttgccgacaggaagttttgttacttccgaaagcacatgtttcaagaaatgctccgttttttctgcaagcatgttctctccgcctgccgtaagacctgccggttcttccgtttcgctgcccttatccggctgatcatccgctgattttttcagaaacgcccggatttttgcggcgtagccttccgtcaccatgatttgggatgtgtttgccgcccacccgcggtacaaagcatggatgccgttttctgttttcatagggaccatgccgctttcttttgtcagcatcgcttccgtttcagcatcaaccgtcatgccgccgtctttccaaagcggccagcagattgaaagggtgtgtccatagcgttcatttcgggcttttttacggtttcttttttcactgaaggcgttcatgaacgcattggccatcgcataatcagcctggcccgcgcttccggcgcttccggctccggaagagaaaagaatcagaaaatcaagctcaatgtcctttgccgcttcatcaagatgaaccagtccggagactttcggcgccagcacatcacggatttcacctttgtgctttttcagaatataattgtcttttatcgttcccgcgctgtgtatgataccgtttaatccgccgtactgtcggcagatgtccgctgtgagcgattgaacttcttgtttttccgtcatgtccgtttgtttgtacacggcttgcgcgccgagatcggacagttcttgcagctggtcttttttacggttatccaacagagaacgccccgttaaaataagcacggcgtcttttgcatgtcgggcgatttctttggcgaataaaaatccgagtccgcccgcaccgcctgtgatcagataaacacctttatccttccacggcttttcggcgccgaactgttcaagccctgtttcctgccattgtgccgtatagcgcttgccgttttcatagcgaatatgtttgtcatcaggatgagcgctgcattcttttacatatcgggacagcgtgtctgccttgacgtccggctccaattcaatcagctggccggtcaggttcgggttttcaagcgccgctgttttcaaaagccccgttaagccgcaaaggagctgcgtatccgcttcttgaggcacgacaatctgaatgagctcgcgcccgccggaatttgaagcgagaattttcttcacttcttcgaacgcctgaagcgcacaagcttcaaaccgttcgtcttcactcttatgctgatcacggagcacgtgacagctgaagtctgtctgtatgctgttcatttgatccgtaaaccggtctgatatcatcacgtgacgggctttgaaatgagtcggcgctttttcatgtacagcggccttctcttcccatacgtgttcaaaaaatagtgtatctgttttatccgtttcaatttcccgtgcggaataaccagtcattttcacacatacattgccttgttcgtcacatacatcaatatccagcttctgcacggcatcttctggcttgctttcgccgctgtacgcaatggaaacccacatatcgcttttacagcttttcaacacatcaatctgttcgagagcaaacggcagcatcggccttatgtcatttccgtctctgtcaagcattaacccgattgtcgcgtggaaagccgcatccaaaaggctcggatggaggacaaactgatcttttgtatgagaaatagatgacgggagtgagagcttcgcgagcactttgctgtcttttgcatagatttccgtgaccgctttgtgagcatccccgtattcaatccccatctgtttgtatgcctgatagcaagcgtcaggtgtgatcagacggcgtgactctcttaatttgtcaatctcgattttggccggttcgccccctcggacaaacgccgcgcttccttgcgcatagagaacgggctcttgttccgaggaagccgattcaccgtaaaccgtgaagcccatctccccattttcttcatcataaagacggagatacagttctgcggattcatccgccgctgtaaacggacgtatccatacgacgtttttcagacggactgttccttcttccttcgtttctgccgcgtgttcaacggccgcccggaccatttccagataagccgcgcccggtaacgtccgctcgtttttgacgacgtgatctttcaggaaaaattctccgccgctaaaagaggaccggaaacgaacacctgacatgtttgatacattttcatgaaggagcggatgcagcatgcctgcccttttttgcggcagcgattctcttttctccgccttcggcacccaataccggattttttcaaacggatatgtcggcaggctgatccgattcggtttgttttcaccgtacaagagattccaatccatcgttcctccgccggtccacttttcggcaatcatctccagactcccggaagaaagccatttatgtatcaagtccggagcaagctctgcctgattgcttttatcggctcggttccgccagcatccgctgaccgttttacccgccagaaagccttccagccgctctttgagctgtgtcatattctgagcggtgaacgcaacccgctcctccatctgttcacggccgatctgaagtgtatacgccgcatcctcaagcggcaggccgggataaataaatgaagacagcttcgcaacatactcttttagccgttcttcattccgggcggaaaccgggaaaatgaaagtctgttcttctgccggttcatacgctgttctccgtgattcttcagggataaattcctccagaatgagatgcacgtttgaacctgtcgccccgaaagaactgatgcccgcacgccggggatatacggtctcgtttccgttttccgtcactgatggctgctgccatgcttcggtatgatgctggacgtaaaacggtgattgttcaaaatctaaatacggattcagctcctcggaatgaagagacggcaccaaagttttatggtgaagctgcagggcaaccttgcttaagccgctgatgcccgccgccgattccgcatggccgatattggacttcactgatccgatcgaacagaactgtttgtcctgtgtgtactggcggaacgccttgacaaggccttgaacctcaatcggatcgccgagagaagttcccgtcccgtgcgcctcaatataactgaccgtgcgcggatcgatgcccgctttgtccaggcattcttcaatcaaatcggcctgcgcgacaggactcggcacggaaattccgctcactgtccccacgtggttgacggcactgccctttatcaccgcataaatccggtctccgtcttttaccgcctctcgcagcggttttaataaaacggcaccgattccttcagccggtacatagccgtctccgtctttcccgaatgtatgacaaaccccgtctgttgaaaacatgtcccataaaccgtatgtcagatatttattcggatgcagcgacaagttgacccctccggcaaccgccgattcacattccccgcgccgaatgctttccgcagcaaggtgaaccgcagtcagcgaggatgaacagaccgtatcgacagccatgctcggcccgtgaaaattgcaaaaatatgaaactctgtttgcgatttgcgcataattaagagaaagcgggaatacatgatcttcagaagaagcttcagccccgaccaacgtataatccttatgcatcacccctgcgaagacaccgacgcgctgcctcttattccgtccgcgcgcctctgcgagcgacttcggcgtatatccggcatcctcaatcgtttcccagcatgtttgtaaaaacagccgttcctgagggtccattgtttcagcttcccgcggcgtaatccggaaaaattggggatcaaagcaatccggatcatcaataaatccgccccattttgaaatgctctttccggaaggcgactttacattttcaaaccggcgccagtcccagcgagactccggaatttcggtgacacagttttttccttctttcaggttttcccagaattcatgaatattttcggcctgcggatagcggccggccatgccgataatcgcgatatcttcatcttgcggaacactgcttttccgtcttctttctgtttgcttctcaacctgcttctctatttttgcaggagacgcgctgaaatggcttccgtactgctctgtcaggaaagccgccagctctgatgccgtcgtatattcaaacagcaaagtcggagaaagggtttcgccgattttttcactgatcgtttcgacgacgtcaagcagtccggacgatgtcagccccatttcatagtagccgacttgagaatcaatctgttcaagcggcttgccgattttttcagccatcagattcatgacataccgttctgcttcctcatgcgggtgtccgccttcaagcgatgccgcaacttccggtaaaccgactttttcaggaggcttctcagcagtctttcggtctgtattgatcagctcggcatcccgcacgagcttgcttgtgaaatctttcagctcggctacttttcggccggatgtgttaaaaaactccagtgtaatgtaaatgagctctttttcctgccgaagcgacgaacgtttgattctcgtgatgcagccggcctgcaaaggttcggaagctgtaaaagattcgtagaaaagaggcagaaacagcctcttttccccatttaacagcgaggagatcaataggtttgcgccgacgccgcttccgtcaagaagagtcggatggaacaaaaacccttcggcctgtcccatcgcgtcttttccgagcgatacatcaaaggtgacgccgtcccgctcctcaaacacttctccttccgctttcatatatccgctgtgaaccaattcctggcttctgcattgggcatacagctcatttaaatcgatggtgcgttccgcctcgcgtttgacagagtcaagatcaagcgtgtcactgaaaactgcgggtgccgtctcgtgcatttccgctttgacgtaaatacgttcttccggctggactcgtccgccgctgacctcagccccttttgcggtaagtttccagcgcccttcttttacctttgtacattcaaccgtaagcttgacggcgctgtcttctttcgcgataagcggctgatatatggataaatggcgcagctgaagcccgtcgtatgaatagccgcgctctttaaaaatctgataaaacatatcaatataagccaatcccggaaggactttttgtccgtaaacgtcatgatgtaaaataaacggatttttcagcgataaagtgatttgcttattgaagttcttcacgttaaacctccacttcataggtatcccagatgtttgccgcagctttttcgttcgtttcttctttgctgtccggcgaaatcagccgcttatttaatgcaggcggtgttaaagggtggcgcttgattcggcgcccttcgtctccctgccacgcttccacaatgacgtgggcatttgttccaccgtcggcaaagcagttaattcctgccgccggcattggtgacggccagtctgccagagtgcggctgaactgaatattggccttttctctatcaaaatgtgtgttttcatgctcacctgataaaaacgggataaagctcttttctttcagcatgagaacaacctttatgaaacttgcaattccttccgcgcaaagcgggtgcccgatgttcggtttcacagatccgattccgagcgggccggcgtcttttgaacggtagacggattgaatggccttcagttctaacagatccgtcacgaccgtgcctgaaccgttcgcttcaatatgagtaatgtcttccggctgttttccgcttttttcaagagccgtcttcatgacggatttttgcgcttccagactcggcgtagccgggcctgccgttcttccgtcattattgacggatgccgccttcactacggcataaatagaatctccgtctgcaatggcctgagacacggtttttaaaagaaccattccgacaccctcgcccagcacgactccatcggcgcgttcgtcaaatacatggaacgactgcgctttacttaatatgccgcgctgttcaaataatttatgggtttcttctgattcaaacaggctcacaccgccgacgacggccgcttttatttctcctgttacaagagcctgcacggccatattcattccgactaaagcagaagaacaagccgtatcgaggacaacactcgggccgcgcatatcaaaatattgagagagattggcggccaaataattctggcccagcgcgacgatcgggtttttcgcatccagcagtttctcttcacccggtctgtgacggctgcgtcccccgaggtacacacctattgcttctccctttatctcatccggcgtatagcccgcgtgataccacaggttaagacattcttccagagcggccaaagcttgagggtccattgcctttacatcttcttcagccagtaaaaagaagtccggatcaaattgatgaattccatcaagcattcccgcgtaataaggcgtcttcacccccatcgctcagccggaacaggaccgatagccgaacggccttcagccaaaagcgaccagtacgcctctaaggaagccgcccccggaaaccggcaggacatgccgacgaccgcgatatcttcccggtgaatctgtttttcggccgcctcttcttgcaccttaacggcttgtgttacaattaccggctcagccggcttcttcataacaggctcagccgccgccaaatcaaaccgttctgacaaaacttctgtatacccttcgagaagccattttgcgaaagattgaatcgtcggatattcatacagaatggacgggtcaagcgatgccgagagattccgattgatccgctgcagaagctgagcaaggataatggagtccactccgtaatcttggaataatacgtctgtctcaagctgatcctggtcaatccgcagctcttcagaaaataattctttcagccattcttctgttttccttgttaattgagcgttgtctgcggcggtatcagcggttttttccgccgattttaccatagccgggctcattggctgatcctgcctgctccgccgcaggaatcgctccggcttccacagcttaggattcagaacggccggcagcaccgggccccttgctgattcaagaagtatgccgtcaaggagctgtaatccttctgcattcgtgatgctgtatagcccgctctctttataagctttgttcgttacttcgcccattccggtttctttccagttcggccactgaatgcttacgatcggcagctgctctttgtatgagtctgcaaaatagtccatatacgcattggccatggcatagtcggcctgtcctgccgaaagcgccggtatcgcagctgacacagaagagaacaagacgaaaaacttcagcggctcttcgctgagcacactgtataacgcctgaagcccctctactttcggctcgagcacgcgctgtatgtcttcatcggtttttctgatgaatgcgagcgtctctttatcggtcacacccgcgcagtgaatcacgccgccgataggtccgagcgtctgtttgatctgactcaattcctgtctcagcccggcttcatcagctaacgggactgacaataccttcacttgtacacctttggactccaagtcgagaacagcttcaattttcgcttttacagaagccgtcaccccattcagtccgcccgtccactcacttcgcggcggaagggtctcacggcctgtaagcaccagttttttcactccgtaatgttcggcaaaatggcgtgcgcataaaagaccgatccctctcgtccctccggtgatcagaagcacatggtggtccggaaaatcaattctctcgccttgcgtattcatattttctgaaccgctcaatacggcgcggtagcgcaagccgtccctccggcaaacttccgcgtcatcagtacgggcatgaaactcatcggcaatctgcttcgccagtttgtcatccgaaagcgctccttcaagatcgagatgccttgaagacagatgactgtactcgcatgccagcattctgtacagcccggcccgttttgctcccgttatttgattggcctttttccccattgactcaaggtctttcgtgacacaaagcagtgttatcccttctttatgcccatgctcaatcaattgctgaagccatttgataccggtcatatctccagaagcttcttctttcgctgcaccgagaaggtcgatgactccgccaaacgcctgccagtcatattcacctgtaaggtctgatgttgtgataatacggtgattcggcatatgcgctgcgatctcttctgcgagattgatcgtgtccccgcctgtcaaaatcgcaacggaacgtgggcacggttcacgcagttcgagcgggctcggttcccattgttttgtcagaatacgtttcatccgttcctctgtatggaccttatttttgtcaggattctcaggcacccaatacgtgtcttttgcgaacggataagacggaagactgagtaaacgcggcgtacccttttcatacagccggttccaattcaacacgccgcctttcacccatacctctgccagcttggcgaattttccttttttaatccaggcgtcaatgacgatgtccatatcttcatctgccgtgaacaaggcaaacgtatctttattgcggtgagactggccggtatacagcccggcgatgtttttctcatttttcgtaaatgcttccagctttgtttccaattccgccatcgtcgctgcaagaatggccaggcgctcttccatttcgtcccttccggtttgcagcgtataagcgacgcccgccaagtcttgatctgtatacggcgtttgacggatcgctttttgcagctgctgcgcctgttcgaacagtttttcttttgatttggcggacaaaaggatgattgccggattttccgggctgtgctcaggcagagcggctgctttcgggacatactcttcaatgacgatatgggcgttgaccccgccgatgccaaatgagctgaccccggcccggcgcggaatggcatttccgtttctatctttcgctgccgtccattcctgattttcccgcacgatgtagaaaggactgtcatcgagctgaatgtacggattgatcgtctcgcaatgcaggcttttcaccagcgttttgtgcttcatttgcaaaagcactttcatgacgcctgatactcccgcggcaagctctaaatggccgatattgctcttgaccgaaccgatgccgcagcggtgatcggagacttcaggctcttgatttgttttcgccagctcgtgaaacgccgctttcaaaccgtttatttcaatcgggtcgcccaattccgttcctgtaccgtgcgcttcaatatacgtgacggtgctcgggtccactcccgctttccgatatgctttcaccaataaatcagcctgcagtttcggattcggcgaggttaacgtattcgcccggccgccgtggttttcagccgtaccgcggatcacgccgtaaatcggattgccgtcacgttctgcatctgtcagtttcttcagcatcagaattcccgcgccttctcccctgacatacccgttggcatctttggagaaggttttgcattttccgtctttgctgagcatgcctgctttgctgtagctgatatgcgcttcttccgtcagaatcgtgttgattcccccggcgatcgccatgtcgcattctccgttttctatagcggataccgcccggtgaatcgcaacaagcgagcttgaacatgccgtttcaaccggctcgctcggcccgtgaagatttaacaaatagcttaaacggttcggaccgatggaaggaatcatgctgcctgtcgccgcatgtccttccggcgcaagacctgcccttgtgaacaaatctttataaccggtatttccggtgccgataaagacacccgtatttgtgccggaaaggctttccggcttacagcccgcatcttctatcgcccgccatgcataagtcaataacagccgctgctgcggatctaaatattgggcttcccgcggtgaaatcccaaagaacagcggatcaaattcagctattccgtcgataaagccgccccacttaatattcgttttgttcctttcaagattcgggtcgccatcaaacgcttgccaatcccagcgttctttcggaatggttgtgatagaatcttttccttctttcagattgcgccaaaattcctctatatccttcgcgcccgggaatcggccgctgattccgacaatggcaaccgggttcaagcggcgcggctcttgtgtcgctgccctagcgttcatcaccgttgcgaaacgctttttccgatgcgttttcggtttttgggcttttggctgctcttttttcggagactccttcttcttttcgccgaaacggcccggatgctcttttgccaaatatccggcgagattactgatcgttccgtactcaaagaaaatcgtcggcgccagctccagctgatacgcttcatttaattgattcgtaaagacggtaaaggatacggaatcaaaaccgtattcactcagttccgtatctgtatcaatgtcctcacggtcaacttttaaaatgctgcttaccatggctgtcaaagcggtgtgaagcgcttgaagagattcttctgcatcgtgtttttcttccggctgaaaaggaagacctctctctgtttcatccgacaaatactctgctaaactgcggatcgtcccgtgctcgaagaagatcgtcggtgccagctccagctgatacgcttcatttaattgattcgtaaagacggtaaaggatacggaatcaaaaccgtattcactcagttccgtatcaatatcaatctcgtcttggccgacttttaaaattgaactgaccaatctgataagcgcaccgtgccatttgtctcccgaaacggcggatacaggttctattttctccacctgcggcttttcagtttcagaaacggacaggaacgactgttttaattttgctgcgtgtccttcagctgctaaaagctgcggcttttcctgagccattccttcataaaatgcagccaggcctgacgccttttgaagcggaaccatgccgaaagcttttttcatcattctttccgtctcgtctcccgcctgcataccgccatctttccacagcgtccagttaaaggcgatcgtttttccgtgccgcaggccattctccgtaagggattgcctgtaagcggcgtatgcatccataaacgcgttgccggcggcataatcagcctgcccgacattgccgagaacgccggaaacactggagaacaatacgaaaaagtcaaggttgcagtctttgctggcttcatctaaataagcggtgccgatcactttcggatcaagcacttcccagaactcttccttcgttttttgcagcaggaaacggtcttgtatcacgcccgctgcgtgaataattccgttaagctccccgaattccgccgtaatctcttttatcagcgcttcattttcccgccggtctgccgcattcagctttttgtagacgacatttgcgcctgagtcctgaagcatagcaagctcacgctgtttggcttctgccagatttgagcggccggtcagaatgattttcgggtgttttacgcgaccagcgatttcttttgcgaacatcaaccccaggcttcctgcgcctccggtaatcagatatacgccttcgtccttccagacggcgccgccacctgcaggatgcatttcttcccaagccttcacataccgtttttctcctgtataacggatatgtttatcatgcggccgatggctgtcgtttttcagtttttgagcggcagccggcatttcgccgattgattccatctcgatgagctgacagtcaagttttccgtattccagctcggctgtttttaacaaacctgttaaccccgcaaacaattgctggctgccgtctgctgaaataacagtctgaatcagaatgcggccctgccttttttcgctgatgatccgccggatgtgttcggcgattgtctgcgcgtagccttggaagcgttcagcggctgtttctccctcaccttctgcaatcagcagctcggcgtctttcaggccggatgccgcttcatcttttatacggcaggcatcttcacaaagtatgatcaaatgctcatcagcatggacagaagctttctcggatgcggcggcttctttccaaaccggtgcaaacaagaccttttccgagcctgatggccgctgagccgattctgcatcgccttcaagcactctcgtagagaatcctctcaccttcacgcaaagcgctcctgtttcgtcgaacaggtcaatgtcggctttctgcacggaatcaccggtttgatatccttcgctgaagcgtgcatgcgcccgcatagtcggtgtgcatggtttgatgacttcaaggtattccagcgcaaacggcagaatcagcttttgtccggaaaactcctgcataatgcagatcgtcgccgtctgaatagccgaatcaatgatgctcggatgaagcgtaaattgtccgttcgtatgagaaacagaatccggaagctgtatatccgaaagcacttctttctcgccgataaaggcggacttaatgccttggaaggcttttccgtggaacatccccctgctccggccttcccgataaaaggccgccggatcaagaatgtccgctgtgcatctgttttgtatggcagaaaggtcggcctcaggctctcgttcagcctttatgatttcagcccgtccttggctgtgcagcacttcttcatcgtcagcgtttacgctgtaaatgtcatatgagatgatgccgtcctcttcaggaaacagcgcgatatggacttggcgctcttgttcgtgaacgacgatcggtttcatccagacggtatgatggagcgttattctgtcttggtcttttaataagccgccaagcgcccgttttaccgcttcataagacatttccaaatatgccgctcccggcagcaccgctttttccctgaccacatgatccttcaggaaaaattctgagcctgtaaaccgtgagctgaaccgctgaacggccaaatctgacgtattttgctgcacaagcgggtgtaaaactgagactccggtgtgtgcggcagatgttttcttttctgcttttttcggccagtacggctcctttgcaaacgggtagaccggcacgctgatccgtttcggatgcttgtctttgtaaagcttgtgccaattaatggcgacacctttactccacatttcacagagcttcgttccttttcctttcgcaagccatttctcaatgagttcagcgctgtcatcatcatcagaaagccaggcaatatcttttgcctgctgtttttctcctctaaagcagcctgttacagccggcttatcattgataaaatcggcaagctgccgcttgagctccgcagtgccgcttgtgataaaggccgcgcgctcttccatcgcttcccttccgacttggaacgtgtaggcaagatcagcgaggccggcgtccgtttttctttccagaaaagccagcagctgttttgcgtactccttcagacgatctttttttctggcagacaacggaatgatgaacggaccggcagcgtctgctgcttcggatgcatccggatattgttcaaaaatcgcgtgtgtgtttgttccgccaagaccgaaagagcttaaagccatgcggtgcgctctgttctcacgggttaactctttcttttctcccgctacgtaaaacggagagtcttctaaatgaagattcgggttcggctctttgtaattgatgctcggcgcgatttcctgatgatataagctcatgacaaccttgatgcagcccgccattccggccgctgtatccaaatgcccgagatttgttttgactgaaccgatgccgcagtattgttttttatctgtatatcggccgtacaccgattgaagtgcggacagttcgatcgggtcgccgagttttgttcctgtgccgtgagcttcgacgtacgcgatcgtttcaggatggatgccggtctgatcaatgaccttctgaatgacctcagcctgtcctttgacgctcggcgcataaaatccgaccttatccgctccgtcgttattgacgccgattccgcgcagcagcgcataaatatggtcgccgtccttaacggcatccgacgcttttttcaagagcacggcgccggctccttcaccgccgatcattccatcagcagccgcgtcaaacgctttaatatgcccgtcgcttgaaaaattcagccccggctgatgaacatatccggcacttgattccgtatgaagggtcgcaccgccgacaagggcatacttggcttcgccggaatgcaggctttgaaaagccgaatgcaggccgattaacgaagatgagcagttggcatggacaaaatagctcggccctttcaacccgagtttatgagaaatcatcgtcggaatcgtgccgctttgggcaagcacccatgatacgtagccatccggcgtttccagctgtgctgtcgtctcctccggcagcaggctgcggtaagagttcgtgcttgcagacatatacacgcttgtttccggaatttcttttgagatatatcccgcatcctcgattgccttccatgaatggagcaaaagcattctcagctgagggtccatatattccgcatctttcggtgaaaagccgaagaaaccgggatcaaacatttctttcccctctaaaactgatttagccggaacgaagccgggatgatcagccagttcttcagaaacaccggatcggcggagctcctcttttgaaaagaagttgatgctttctttgccttctttgatgttattccaaaattcataatgatcttttgctcccggaaactcacaggatataccgataaccgcgacactgtcctcataataatcgggaatttctcccgctgggtgttcccggtcttctgtattcactttcttttgcggcacaggagccaaaacggtttctttcagtttttgttctgtgatgtaccggctgatgtcttttaccgtcgcgtattcaaacagctccgttacactgaattcacaatccagttcctgcgtcatccggtcagtgacagtcacggcaagaagcgaatctccccccgcatcaaaaaagcggtcatcaagctctatatctttgcttttcaatacatcctgccaaatcgccagcaccgcctgctggatatgagatgatgaaaatgtttgtgtgtccggctgcttttccgtcagatcgcgggcagcaagaagcttgcggtcaacttttccgttcggtgtgagcggcagctcttcaagacggataaacgaagctggcgtcatataggccggcagcgcttgtttcaaatgattgcgcaattcctttgcagacggaagcggctctccgtttttcaggatataaaatgcgcaaagtttttcatttccggagtgattgttcacaaccactacgctttcctgtacggccggataggcattcagccggctctcaatatctccgggttcaatccggtagccgcggattttgacttgggtgtccatccgtcccatgtattcaatgcggccgccgggaagaaaacgcgccatatcgcctgttttataaagctttgatcccaattcgagccggtggctgacgaaaacgttatctgtcagctcaggcttgttgaaataccctcttgccaatccgtctcccgcaatacaaagttctcccggcatcccttctaaaacagggttgagagcggaatccataatatacacacgggtattggcgatcgggcgcccgatcgtaagcgcgctctcattttccgttatacgctgcaccgcggaccagattgtcgtctctgtcggcccgaacatattccaagcctcacttttcgtatcgagaaactgctgcttcaattgttcgctaagcgcctctccgccgcaaaggattttcactttttcttcatttgaccatccggaatgaaagagcattttccacgtaaacggcgtcgcctgcatgatcgtcggtttgtactcttgaatcagctctttcagcttccgtgcgtcttttgtgaattctgtcttacagatgttgcactctgctcctttgattaaagggaggtaaagctccagtgccgcgatatcaaagcaatatgtcgtgacggcaagcagtttgtcttcggacgtaagccccggttcattcgccatcgagattaagaaattggtcagcgcccggtgcggaatcatcacgcccttcggtttgcccgtgctgcccgacgtgtaaatgacgtacgccagatcgtcaggtgtcactaaccgcttcagcgacgttctttccgcggctgtactttcaatacgagaccaatcgcggtcaatggcagttgtctgcacgcctccccagttcaaggagtgctctaaatcagctgtcgtcagacacattgaaatcctgctgtcggcgatcatatattccaatctgtcagcgggataagaaggatcaagcggcacatacgctcccccggcttttaaaatgccgagaaggccgacagccatatgcaatgaacggtctgtataaatgccgatgagatcatcagggcctgcaccgtgcgcctgcaaatagagcgccagcttcgtgcttttttcatcaagctcacggtacgtcagcttttgctgttcatacacgaccgcacaagcgtccggcgtttctgccgcctgacgttcgaataattcatggaagcaggcatccggatattcacggcttgtctcattccaagtcttaagaatcatgtgctcctctctttttgtcatgagagaaacgttctcaagcggcatatccggattcgccgtcaaagcttcagcggcctgtacaaattggctgaaaagtctggccgcccctgcttcgtcgaataattcggtgctgtatttaatcgtaagatccatgcctgatgcttcttcccacatttcaaatacaagatcatattccccctcctgatgaatgtcttttacaaactcacaggagaattccttgtattcatccagcatcgattgatagcttgaatactgcagaaagttctgatagaaaaaggcattgctgaaaacaggcgaaccgttctgcaggggtttcgcatgcacatcacgcaccattttcggaaacggataaaaggagtgatccagtccgtccagaacggcatcctgcaccttttgaacaaagtcagcaaatgtttcttttcgtccggctctgctccgtataggaagcatgttgaggaaatggccgaccactccgtcaaagcgttcttcaggtctgaccatcgcaggcatgcctgtcacaatatcttccttatctgtatatttgcttaaaagcaccatatagcagctcagcataacggtagacaaatgaatcgaacgggatgcggcaaacgccgttagattattcagcagccgttcgggaagacggcgtgtcagcgtatcttctgtaaactccggaacgctgctgcccgtgcgcatcggcggaagctgaaggtcaggcagatcgcccccgagctgtttcatccagtaagcgcgggcagctttgctttcttcacccgctaaataccgcttttcccaagccgcgaaatcggaatgaatgccgggagcggcggccgcaaactcttcttttccctccagcagcgcctgataatgatccagcagactgtgaataaatgtaatggatgaaaaaccgtcaaacacgatgtggtgaatgaccgtcaaaagataatgttccgaggcggattttgaaagcagccgcacgcgcagcaaaggcccgccttctttgacaaacggctctttaacttttttccgtatcagagcgggtatttgtgattcattgacgtcagaaatatcttcttccgagaatacaaaaggatctgccgcttctatgaaataaaacccgccgtctgtttcattcacggcgcttttgagcatcggatgctgctttaatacgagctgaaacgcctgtttcagtttctctttgtcgattccggttgtgaatcggaaacagagcgggacatggtatgcagtcgtttcaggcgacattttctgcaatgtccacagccctttttggacttctgaaagcgctggcgccgtttgccgtctctcccgttctgccggcggttcggctttttgggaatgatgctccgctgacatgtttgccgctttttcagcagtataagccgctaaagcgccaatcgtcgggtttttgtgcagctctcttgccgtcagccggatgtgatacgttttttcaattgatctggcgagtttcatcatcttgatggagttaacgccaaggctttgaaacggtgtatttggatcaacaagctcatccgcgatggaaagttcctctttcagaaaacggataaaatcccgttcaatttctttctctgcagaagccggggctgaattgccgccttcttgtctgttattatgtaatgaatcaaattgcccttgttcgaatgaatgtttcagctgagtgcgctggattttcccgattgccgtcttaggaatgtcttcttttgcgaccggaagcagataatcaggggtaacgccgattctctgtgtcacgtgctggtgaatgtgatgaataagcttcgtcatgcggttctcatccaatggaacagacgtcacaaagaaaatcgccagctcatctgtcgtgctttgattcggccggacggcgcatgccgctgtatatgacgtttcaatttccggcaattcctcaacggctgattcaatggcgtggctgtaataattcacaccgttgataatgatggcatctttcgtgcgccccgttatcgtcaggcggccttcacgcagaaatccgagatctcccgtttcaaaccagccgtcttctgtaaagacactctcgtttaagtccgggcgctcataatatccgctcgttacagtcagaccggacacttgaaagcggccgatttctccttcttccaccacttgattgcggtcatccgtaattctcatattaaaccccgggatcggcagaccgatctcgacgaaacgatcgtcgtcactcgtgttttccagtgtaaactcatctgagaaaattacgcccgaagacgtttcggacattccccatgcgggacggatggcattagccggcagaccgtgcggctctaaaagctccataattctgcgtccgactttcgccaccgcggcctccccgccgttcagcatataacgcatggaagataagtcccatttccgtgtttgaatctcttctgcgaaatcggcaagcagcccaaaggcaaaattgggggcccacgtgaccgaagcgcggtaatgatcaatcaggtcgagccattttaaaggatccatcaaaatggattcgctcggtatgttgatttcctcacatccgagataaacatcacgcagatgaagcattccgatgccgccgacatggtcaaaaggcatccagttaaacgtgacatcctcacttgtatagccctgcatctgaatatttcctttgaccatgcagacgatgttttcatggctgagcatcacggctttcggcgtgcccgtgcttcccgaggtcaaaagcagcatcgccaaatcttccggacggggatgatgacagtccgtatccatttcatgcgcactgagatcttctgccgccaaagcgcaaaacccggaaagctcctgctcctccgcccattcagtcatctccggcagcacttcacggcttgtgatgacatacggctgattcaaaagcgtccaggcgtctttcagtttttgcgtcccgctgttcatttctgtataagccggagcggccgcaagcggaaccgggatcgctcctaaaaaaacacagccccaaaacgcaggaatcagctgggaattgtcactgagctgtaatatgacttcatcctgagccttcactcctgattggcggagccctttcacaatcgaaagagcgatctttttcaggccgctgtaagtctggtacactttggtgccgtcaggctgtatatatgtgatgcccttttgatctcccgctgccgcggcggttttgtgcaggacttcaggaatcgtcatcggctgatccgctgaaagccgcaatggttttccgtagctgacagatggcttgagtaacccgcttgccttcatatcacttttcatagagctgcctccatttcatctgtatgtaagatgtatgtcttatactccgtacatcgtcgtgattcgttttttcacttcatcatcatgaaacgtctcatcgtgcatgattaactccttctcaatgacagccggaagctgctcgcgaaacggcgtcaccaagtgccttttcaatgtaattaaagagtttctcggtttttccgcaagctcacgggccaattcctgcgcatagtctaatacttcctgccgcggaagcaccggaaaaggcactcctcttttctccaggtcaccgccgcggtagtggccgccgtttaacagcatttcatggccgaggcttgccccaagcttctccggaacgataaaggtagcccccattccgggagtgaaaccgtatttcataaagtttgcggtatacacgctttctttgcttaaaatgacaaaatcactgaaaagccccatgacaaacccgcctccgattccgtggccctgcatggctgaaataacggggatatcacattccagcgccaaagaatacatgcggtcttccgtaaacttcgtgatgccctgctgaatcctgagcagaccttcctgtgtgcctccggaagcaaagtaatggccgtatcctgttaaaatcacagctttatagactgacgatttttttatacgggtgaatgcttccatcaatccatccgtcagttctttggagaaagcgtttttatgggctttatcctgcattgtcacttggataatatccggttcaatttcgagcagttcaactgcggcgttcggcatgatatcctcctaactgttctccgtttcccaaggaagccgccccgtttctgcataacggaaaatggctgattggttatccggatctgaaaacatcgcttgattttcggctagagcaatggatttcgaacgatgaacaaggtcgtttaaggaatccatgtattttttatagcggatgactgcttttttcgacagcgggcgaagacgcagcaaatgctttctcagctctgttgctgagtccgggacgcatacgtcacaaagtccccattcaagcgcctggcgtgccggcacgggctttgtcatgatcgtcatataatgagccttttgaaatccgattctttgaattaaaaacggcagaacgcaggctggataaagtccgaataacagttcagataaactgaacgaagcactctcctctgcaatgacgatatcgcaggcggcggcaaaaccgacacctcccgcatttacttttccgcggacgcgggcgattgtgatgtacggcccggattttaatgccagccacaaacggtaaagcggctcctgcgattccgcatgctgcattccctgcctcattttccggtacatctcatcaaaatccgccccgaaacaaaatacctccggctgcccttcaagcactacggaggtcacggagtcttcacattcagtaagaacgtgcaggcattcctccactaaacgctcattaatcgtattgttggcttcaggccgatcaaaggtgatgaagcagacattttgctgaaaacggacgttgatcgtctcataggtcacgggatccacctgtatttccgatgaaattccgtgatttcttccaaatataaacgagggctcccggcatgatggtctaaaatgttcggaatcatattcatatccaatttgacattccgggttccgaacttcaccagaccgctgcctttaaacagttcttcatactcttccatggacagcctgtatctgttgttcagatgctcttctattttgaaagaatgctgccgcgtttgtccttcaggcgtcacaacgccgctgtaaaattctgaacagcatccggagccgtacgagaaacagccgatccgcttagaagtgtcgaaagccccttgatcaatcgtgcttgcaagagccagtaaagaggctgcccccataatgtttccgactctttggcagtagcggagccccggctctaccctggtttgaaaatcctgttcgatctcagcgtttttcgcttttgcaagcttacgcatcatcgtccggtgagctcctttgaccatgccgccaaacggtgtatggaaggcaagatagtgaaacgtctctttatagtcagcgcccggcacacggtttttgtactcgcgaaatgtctgttcgcagcaatcgagataagacatcaatgacaagtcggcgtcaccggcttcactgtccgggatcggacggcatgtatccatcacctcatagccgtaatagccgttggcgcccgcatccgcctgaaatacgattgggttttcaccgatcaataaggcgacggcacccgctccggcgctcggttcggcgtaagaccaatcctcgcttaacgcatcgccgccttcggcaattaaaaaccgggaaatatccgtcgcgacgacaagcgccttcgctccgggggatgtctgcgacaaaataaaattaagcgccatctgcaaacccgccgttcctgaataacaggcctgcttcagttcaaataaacggcagttccggttgaggcctaaataatcatgaatatatgtactgagtgattttccgaagtcgatgccggactccgagcaggtaatcagcagctcgattctgtctttttcagcctctgtcaatcggtcgataatcggctttgccgcattaacgccgaatgtgacggggtcttcgtacggaagcgccaccgctttttctttcatcagtaaattctcaaatctggcagggtctaagtttctgtactccgccagctgcatgacatcaaggtatgccgtcccgccaaacacatttatcgcttctattccggcagccgccatgaacttcgcctccaatatgaattttgagtttccgattttttcaccgttttatcagacagcctgtaccttttcataaagctttgccgccaattcgccgatgtttgacactcccgtcagctcaacacgcgggatctgcagtgataattcttcaagcatcatcgtgataatttcggcgcggtccactgagtccgcccccagatcaactaaccggtcttcctttgaaagctgttcgccttctaaatcaggcaaaacctcgtagattgtgttctgcagcaattcaaagattctttcttcactcattgtcagttcctccctgtttcatcttttatgaatattccatgttttcaatctatcatttcgtcttgtcaacacgtttgcagaaatgagcctaacttctgattcaaaagcgaggccgtctcttccataagacgaaggccgataccatcggcatggcggtttttccaggactccagctccgtacctttcacccattgattaaaggcgcctaatgccgggccgcaatgaatctggaagtctaccttggcatccgggtctcctttaatcgccgaagcagagctttgcctgaaataccatttgaatatgagcgccattttctgtttcggattccgttcggcttttgaaatgtcttcattcgaataatgagccttcactttgtcataaatactgcttacacttgccttaaaatacttctcttctatttgtctgagtgtcttttcatcaatttcttcaattgagcggtgacgctgatacagttcatgcagcttagaggcccgggtcggaaagaacagccctttctttaatacctgcaccttgctgcctgattcaaacatatcgccggccggcgcgtaggccgtgtcctgtacattcatctgctgcaggagatcctttacgaggccgctcgtcgctgcttcaacggtgcattggttaatggatccggtcacaataaaatcagcgccgagcataaatgcggccatagcagcctcaggcgttccgattccccctgcggctccgatgcggacggttttgccgtatcggtattttttcatcatgtcatctcgtaaacggatgatcgccggcatgagactgtaagcaactccgccgtcagtgtggccgcctgaatcagcctctacgcagatgtcatgcgcaacgggtatttctctcatcagacttgcttcttcagcggtaattttgttttcggctgcaagtttctgcagaatgtgatcaggcgccgggctgagaaatgcttccgctacttccggacgggacagctttgcgataatccgctgacgcgctattatttgtccgccggcaccgcgttttaaccccttagcgcgaaaccttactaaagcaggagtaaccgttaaaaatgctgatgcttccaagttctgaaccccatgcttcagtaaaagatcaatcattttttcttctgaatctgtatgcttcatgttatgtacaacatttatgccaaaggaaccgccgtcacgaagctcatgctgaattgacaaaatggcgtcctcaacgtgcgcgatgttcaaaccgcccgttccgaaaaagcccatcattcctttttcggccagtttgacgaccatttccttcgaagaaattccgcggtacatgccgccggccaagtaggcgtatttcaattgataatcgcgcttaaactcttcatttcctaaagactccgccgtaattgagctttttccagcttcagccgggactttgatttcatctgttatcggctccgcttcagccgtaattctttgaatcagccccgtcagcacttttccgggaccgatttcctcaaagatcatgttctttcttcccattaaaaaacggatgctgtctgtccagttcaccgatcccgttatttgtccggtgagtgtctttttcagctcggtctgctcataaggtcttgccgtcacatttgaaatgaccggaatggacagcggcttaaaatggaaagtttcaataaaccgtgaaaattcctccttcgcttccagcatgtatctggaatgaaaggcgccgctgacatttaagcggtgaaccatttttacgccgtttacggcttcaaaaacggatgcggctttttcaatatcttctttatatccggaaatgacaatttgctgcggagtgttcatgttggcgatatcaatcgtatgcaagtgatactcccttaaaacgtccgtcacctgctcatgagtcaggccgatcaccgctgccatgccgcctccttttgcgcggctcatcaggtcgcccctttttttgaccagctgtaggccttcttcaaaatcaaaagcgcccgaggcgtataacgcgttatattcgcctaaactgtgtccggcggtaaaatccggtttcaagccggtttcttctgtttttttcaaataactgagggcattgacgacatagagcgccggctgagtgaattgagtctgattgagacgttctccgtcccggcacagctcctgaatggaatatccgagaatgtgatccgcctttgcggttaattcaggatagcggccgaacaggtcctctcccatccctattttttgcgagccttggcctggaaaaacaaagctgatcatcttacagtctccttccgggcggtgataaaatgctgtcttctatttgctgcaaatgggtttgttctttatgaaacggcgtcataatggcacggatgcgttcagccgatcctgcgggaagaatctgtttggcaaatgcggccaacgttccggaaggcccggcatcgatatacaatcctttttggcggctgtctgcgaattgaagcgcttcgcggaattgaatcggctttcttacaatatcccagaaaaagtccgcttgtatatcggtctcagcctctccggtcgcactggagatgtacggtataaacggagtccggattaatttctgagctaaaaagcgcttgtacggctgttccgcctgatcaaccagcgctgagtgaaacccgtaagataccggcaatagctgatgaggaatctgcttttctctcagatcgtccatgatctttttgatatgttcccgctctcccgagatgacaaagtgagaatgatagtttacagatgccaattcactatgttcgccgagcagcggatcatcttgatataaagccggatcacccagtatcgcaagcatgctgccgttacggcaagtttccgtaatgattcgggcctgttccagcacgcaatctaaagcatcctcagcgctcagcacacccgacacagcggccgctgcatactctccaaggcttgctccgatcacataatcgggacgtatgcctctttgctccaaagcatatgcaagtgcgtactcagccataaaaatggcaggatggctgaaaagaaggcggtcaaatggatcagacagacgattgcctgtatgataaacctctttcaggacagagtaaccgaaacggctgactgcaaaatcgtccaagtcaagcattttctgccgaaaagcggcgttatgtgcaaacagctctttccccatttgatagtattgggaaccctgtccagaaaacatgaaaacaattggctggttcatttgttctcctttttgctctttatttttttaaaatattgatttgtaagtttttcttgatgttgtgtgcaggtgaagtggtcgtgatgttgtatggctggcactattatgtgagataagaattttgacttgcgttccgctacatggcgggtgaagcttcagtttcttttttgatgcggtgaataagtcctgtcagcacatggcccgggccgacttcttcaaattccatccgccctttgtccagcagatagcgcatgctgtcgttccatcgcactgaatggtcgatctgatcggccagaacggagtggattccgtcttgctcataaggcctggcatgcacattagaaatgacaggaattgatatagcagaaaaatgaaatgactgtaaaaatttttcgaactcttgttttgcttcgctcatatatctcgagtgaaaagcgccgctgacgtttaacggatgaaacatcgtaacgtcctttattccttcgaatacgcttttggctctttcaatgtcttctttgcgtccggatatgacaacttggtgaggagaattcatattggcaatatcaatcgtatgtaatccgtgcgtttgaagggcgtccgacacttgagctgcggttaaccccataacggcggccatttttccgtcagtggccatactcattaattcgcctcttttacggacaagctgcaggccggtaataaaatcaaaagcacctgctgcaaacagcgcattatattctcccaaactgtggccggccaaataatccggctttatgtcattttcttggatttttttcaaatagcttaacgcgtttacaacatataaagcaggctgggtgaactgcgtcttgtgaagattggaatacggattctcaagacaaagccgtttcatggaatatccgagtgtttcatcagcctgctccgttaagtctttaaattcatcaaacaatgagcttcccattccctgcttttgagaaccttgtccggggaatatgtatgtgatcattttctcagccatcctttctcggattcagttaagaagcatgttcaagttgatagtaacttcacaaaaataccatgtcaagttaatttatcctatgcggaatcctgaataatgcctatttttccctgacggaaggcggactcagggcttttggaatagacataagcagaatgtcccattcagcctgcccggcgcttttatccgcaaactaccgttactcagccattcatcaccaaaaagcgagcaatgactatcatttcaattcagaagttccgtggcctaaaagaaaaactagttagatagaaccaaattatacgctacttaaagtgaaacagccctttttgattttttctgttgcggaaattcacgaaatgttcttttttttcaatctgaaagtaaatattgtttttcaaaagactctccattttttgacccggcttctccccgaaggagtgccccggatacacacgcacatgcggcggaatagaggctttgatcctctgtatactgtgaaacatatcttcagctgagctgcccctgtcctcacatataccgcacccttctgtaaacacggtatcaccggtaaaaaggtgatcagatagcaaatagcacattcccccggccgtatgtcccggggtcaatatacttctgatgataaaccctccggccgcaaaggtttgtccgtcttcaagcgctattaagtttctgcaccggaattgatagaaatcgatttccgccgacgacatgtatatatcagaatgatagatttgctgaagcggctccgccaagtttacatggtcataatgcgaatgtgttaataaaatagctgataaatcaacatccaattcatgcagtttatcggttattttatcgatttcccaggacgggtccaccgctatcgcagatttttttgagcggtctgcgataatataacaatagttggaccacatctggtgataagttttgatttgatgcacttcatatgtatgatccattgtcaccattcccatttaaaagatccgggcagactgctgccgccgcccagccgactgtaaccactttaccagatggcaccacgtttttccatggattttccggtaaagtttaaaaaactttctgctcccgccaaaagcaccagtctgggccttttttacaaattgctatgctgatatataaggaaatcagaatattaattcagatgaattctttagggaattttattcagaaaatgaaggatgaatatgagtttcggataaaaagaaaacaaattgaacttttgttttgagaagcaattacagaagcggccggaggagataatcagtttttagaaatgacccgcaattaagattattatttcaatccttttcttcagataaactaaaccacacgggctctcgaaatatatcagaataccttagttcttacaccgaattcaacgttatgttgacattaacataattgaactgagaaaagtacagcttaatttacactctttttttttgcgagaaaaccgttcaaaaaccagtctagctgcaacaattcacgaaagcgtcgcgcatgaaaaaagacgtcagttgaagacgatttatatttgattattgacaaggagctcagatgtttttgttagggctaaataaagttatctttttactgtgtaaaaagtaaatattaagatttagacaaatagactatgtgatatgggtcggagtttactgttcaaggtgatttgtcctgagctataaaagcactgagagcagctcgggacgcaatacctactaaagttaaagctgctatgggtggaatcggcggttttgaaataattcttaatatcattgacaattttactggtgcagttgaagatgcgtgctatgcggatgctctaaaagtaactggtaaccaggcagcaactttgtgggttactaaaactcttatgcttttcctttaaatggggctattgttggtgtttaacaaatttatcctgtgttaagctttaaagtgattattttctaaagtgtttaagatcggaggtaactatggaagataaaagtaatgctgaaccgagcccgaaagctataagaattctaacttacatcattcctataattttaatagggcttatccttgtccttaagaatattaacaccgccgcagcggaaatttcattttatattgttgctgtcggtgtggttctcttagtggttttcagtttgatcaaaaatagaaaataccgcaggaagaactaaatgtaagggggctaatcactagtcccccttgactgacttgcggatagtataacccgccaaattccaattttatttaaattcttccccatctcttccctgtgactttgtaaaagcaggtacccgcatacagagtattcatcttgtacttcagggatccttcccaaataactggatgttaaacaaattatcttcatgatttacggtataccatgcaacaattatgccagaactcaaaagttatctctgaaaggctgggtcattcaaactagtaaggctgcttgtgggtaaataacagtttagtctcacataaacgttgttattacatcacacgcttaaacatcttctccatttcatacgtactgtggtggataatgatcggccggccgtgcgggcatgtgaacgggtctgtcgttcggcgcaggtcgtccaagagcgctttgatttcgtcgtttctcaaatggcggttcgctttgattgagcctttgcagctcatcataatggccgcttcctccctgagttttttaatatcgatctgtttggcgtcaagcacctgctgaatgatttcttcaatcagttcagcttcttccccttttggaaaccaggccggatggcagcggacgatgtagctgttcgtgccgaatgcttctaaaaatactccgacgctttcaagctcatgctgatgctggtcaatgatcagcgcttcatttgccgcataatgaaaggtgagcggcacgatcatatcctgcacttcaggctcgacctgcccgactttctcccggaaatattcgtatttaatccgttcttgcgccgcatgctggtcaatgatatacaagccgttttcgttttgggctaaaatatacgtcccgtgcatttggccgatcggatacatcaccggaactctttcttcccgtatttcttcagagtcagcctcctcttcaggctccggaatatcggaaacaggcgcttccgttaccggcatgccgagctccggcggcactccgtgacctgcttcatccggcagggactcttcttctatgaccggctccggctcttttacgaccgaactcagcttcatcggtgagtaagacggctccggcgttttttcaggaagtttccgctcaggcgcgctttcctcgaatgtcataaattgctgttcgtttttggccggtgccggcgctgtttttttcgggagctgggcgctcggaataagccgctgcttttgaaacacttcctttatcccgtcacggatcagctcatgcagctccgtctctttgctgaggcggacttcaagcttcgacggatggacattgacatcgaccaaaatcgggtccatcgtaatttcgataaacgtaatcggatggcggccgatcggcagaagtgtgtgatagccctcatgcaccgcttttacaagcgggaaattcttaatgtatctgccgttaatgacagatgacatatagtttctggatgcacgcgtgatttctggaagcgcgatgtagcccttgacttcaaaatcaagcgagctgacatggagcggtatcatttttttcgcaaccgccgtcccgtaaattgcggccagcacatggcgcacgtccccgttaccgtttgtctgcaacagatttttcccctgatggcggagacggatggatacttccggatgcgcaagagcaatccggttgacaacatccgtaatattgccgagctccgtatgcacggttttcatatatttcaatctggcgggcgtattgaaaaacaggttggtaacgataatctccgttccttttctgctggaggatttctgttcagaaatgatattcccgccctgaagaatgagatgggttcccgccccctcgccgatgctcgttttgatttccagatgagaaacagacgcgatacttggcaaagcttctccgcggaaaccgagtgttctcacccggaacaggtcgttttcatctttgattttgctggtcgcgtggcggcggaaagcccgcttgcaatcatcggtttccatcccttcgccgttatcgagcacccgaatcgacgaaagccccgcttcctctatgtcgatttcaatgactgtgctgtttgcgtcgatggcgttttccaccaattctttaacgactgaggcaggccgttcgaccacctcgccggccgctattttattcgaaagttcatctgacagctggatgacttttgccaagtccgtcacctctttctattttaattttttttgcagcttgtacatttcattcatcgcctcaagcggcgtcatatcgagaatattgattgacttaaaagcttcaagcacttgtttttctttattagaaacagccggtgccttctgttctttttcaccgtcagcaaaaaaggacagctgtgccggttcttctttgacggcgggctttttctcaggtgccgccggaagctccggtttatctcccgtctgctcaagctgtttcaaaatctcctgcgcgcggctgatcagatcgtccgggagctccgcaagctgggcgacatgaatgccgtaacttttatctgcggctccttctttgatttgatggagaaacacgaccgttccgttatattcctctgcgcgcacatgaacgtttttcagctgaggaagcttatcttcaagcaccgtcagctcatgataatgcgtgctgaatagtgttttagcgccgatatgatcatgaacatattcaataatcgcctgtgccagcgccattccgtcgtacgttgatgtcccgcggccgatttcatcaaacaggatcaggctgtcttttgtggcgttcacaatcgcgtttttcgcttccagcatttccaccataaaggtgctttgtccggaaatcaaatcatccgccgccccgattctcgtgaagatttgatcaaaaatcggcagaaccgcttcttttgcgggcacaaaacagccgatttgggccatgatcgatagaagtgcgatctgtctcatgtacgtgcttttacctgacatattcggacccgtaataaggagcatttcccgcgaatcgcccatcaggcagttgttcggcacgtattcttgactgtccatcaccttttcaacgacggggtgtctcccttcaatgacttttacttcattatcagaaaagacgggctttgtgtaatgcctgttttcactgatcgtagcaaagcattgcagcgcatccagctcactcatttgtttggcaagacgctgcagacgcggaataaattgtttcaccttttcacgcagaccggcaaaaagctcatattccagctcgcagatgttgttttccgcttctaaaataagcgcttctttttccttcaattccggcgtaatgtaccgttcggcgtttgtgagggtctgcttccgctcataccgcccgtcctcaagcagatgaaggtttgcttttgtgacttcaatataatagccgaacactttattgaaaccgacctttaatgaacggatgcccgtataagcgcgttcctgctgctccagtctggcaatccagtctttaccgtttttgctggcgtcacggtactcatcgagcttctgatgatagccgtctttaattaagttgccttcttttaacgataacggcgggttttcatgaagggcttcttctaacaggtcaagcaaatctccgcacggatcaatcaagccggcgcgttcttttgcttttttatggttaagagatcctacaagctctttaatgctcggcacttgttttaaagattctttcagctggattaaatctcttgcgttgacgtttccgaatgcgacccggcccgccagacgttctaaatcgtatacttccttcaggcgctcgcgcagatcttcgcgctcaaacagatgattgatcagcgtctcgaccatttcctggcgttcttcgatttgggatgccctgatcagcgggcggtcaatccattgtttgagaagccggccgcccatcgctgttttcgtctcgtctaaaagccaaagcaatgacccttttttgcttttcgaacggatcgtttccgtcagctcaagattccgttttgaatacaggtcaattttcatcgcttcttccaattcatatacttgaaccggctgcagatgatccaggctccgtttttgcgttttctgcaaatacgtatataaacgcataaacgtctctgtcagctcttcgcccggcaagtgctttgcgatttcaatgcgttctgttatttccccgtcttcgatagaaatcgttgcgccgcaccgttctttcagctgagcagccgtatgttcgttaaacttgcttgatacgacaatttcctttgcgccgactgagtaaatttctgacatgacatcttcaatccgctcaataaatacggccaggttttctccggtcgttaagtctgataaagcgagaccgtatccgttacgaaattcggaaacggaagcgataaagttgttttccgactcatggatgccttttccatccatcacggttcccggggtgatcagctggacgacttctctttttacaacgcctttagccgccttcggatcttccgtctgctcacagatcgccactttatagccctttttaatcagctgttcaatataagccgccgcggaatgatacggcacgccgcacatcggaattttatcagccgaacctccgtctctgcttgtcagtgtaatttcaagctcttgcgacgctttttttgcatcttcaaaaaacatttcataaaagtcaccaagccgaaaaaataaaaaggcatcttggtgctctgcctttatcttcaagtattgctgtatcataggcgtgtaactagccatcatttaatccctcactatgtatcttctcttatccgaatcccattataacataaacaaaagagtgatatctttatatataaaaaagagactcggggtgttaaactcccctagcctcaacttattcttcaggatctccgactaaaaattcagggttaatgtcctctaattcttcgtcaagatcgtcttcccaatcatcatcatcgtcttcttcccagtcaggattgacttcgacgacgactttcgtttcaccgaccacttctgctaaaaattccctctctgcctgaaccacgattttatttccgttaggagaaatggtgacttcaagacaattcggctgctgcagcactttggcaatgacttcgtgttcgtcatctaagtaatttgtatctctgtatctgagtttaatcacatcgacatactttactctctcggttacaacttccgtttttgtattatcggcgtaagagtaccagacgtttatatcataatacccttcaatttctacagtcttcccgatcttttcggcatcgtacttgtggttgataatccagccgcccagtatacttgacggtttttctccaggcgagatcgtgttggtgcattgggtgaattttcttcctttcgcaactaccgctttcgtaataatttccctgtattcagacattccggcaggcctccttgttcttcttcgtgttatcttatgctgggcatttgtctcatgtgcatttttataataaaaatataaaaatacaaagtttctgtttcattgtatgcagccctgcccagaaactttacttttaagtatgataaaactttccagtaaaaataggacaaaacgttgagacaatgaaaatttagtacatattacaattagttcttaaacggcaaaaaaaacacgggccgatgaaggccccgtgtttaaatagaacagctgttattcgaatgttttacttttgaaccggtttctcccgtcagcaggttgcctccggtagatgtaatgatttcgtttgtcacctgatttgagatcgtatgtgcgacaagctgaagaaggtcattgacctcaatctgggaatctctgaattcctggatgatcggaatcccttcaagctcttcctgcagggcgtcaattttactttccacttgtttcagcgcttcaagcttttcgtagtgcttcaggttaacggcttgcttttgcagggttttaatctgattaataatcgcagagactttttcattttcgttaatctgcgcctcggcgcgtttgaaaaaatcaacttcttctgtttcagaaatcattttcgcaaggttcctagcctgctgtacaatgtctttctttgagtaaagcgtcatcattatttcacctcgattgcttctcctgccatcacaccgtcaagcgaccatgttttcgcctgttcgattttgacgcgtacaatcttgccgatggcgtctttcggccctttgaagttgacgagcttgcttttttccgtatagccggcaagaatgtcagggttatttttgctttctccctcaactaatacttcgacagtcctgccttcatattccttcatttttttggctgaaatttctttcaccaaatcattaaggcgctgaagacgttctttcttgaccctcatcggaacattgtctttcatcttcgctgccggcgtgccttcacgaggagagtaaataaacgtatatgcgctgtcaaattccacttcgcgatataacgaaagcgtttcttcaaattgttcatccgtttcattcggaaaaccgacaataatatcggtcgtcagtgaagcgttcggcatcgccgctttaatttttccgacaagctccagatagcgttctctgtcatatttacgggccatcatttttaacatcgctgagcttcctgattgaaccggaagatggatatggtctaaaaggttgccgcctttggcgagcacttcgatcagatgatcatcaaagtcacgcggatgactcgtcgtgaatcggattctcggaatatcaattttacgcagttcgtccattaaatcaccgagaccgtacgtcatatcctcaaaatcttttccgtacgcattcacgttttgaccgagcagcgtgatttctttatagccttcgcttgcaagtcttctgacttcctggataatttcctcaggacggcggcttcgttcttttccgcgggtatacggtacgatgcagtatgtgcagaacttgtcgcagccgtacataatgttgacccagcctttaatttttccgttgcggactttcggaaggttctcaatgacatccccttctttcgaccacacttcaatgaccatctcttttgataaatatgcctctgataacagttccggcagacggtgaatgttgtgcgtgccgaaaatcatatcgacaaacgggtgcttcttaaggatgcggtttacgactgattcttcctgtgacatgcagccgcagacgccgagaatcaagtccgggttattttttttgagcgcctttaaatggccgagctctccgaacactttgttttcagcgttttcccggatggcgcaagtgtttaataaaataacgttcgcgtcatcaaccgaatttgtcgcttcataaccgagcgccataaaaatacccgccatgacttccgtatcatgctcgttcatttggcatccgtacgtgcggatataaaatttcctgccttcaccaaggcctttaaattcttcagagattttaaaatcgttatgatattgaacggattctttgccccgttttttcgcatcttttaaagaaggcggaatatatacggcttcaaaatacttgctgtaatccttttcggattttttgtccgccggattcacttgtccgctttcctgcttttgcttttcattcatgttcgaatgtctcctttcaaccgaaacttccaccctcaagtatactggttaaaagcgtttggcacaaccgccagcctattattgtacaccttattgagaataagaatcaataagaaataaaaaagagggaatcatttcccccttacacaagctgaagctcttttgcggctgaacggattacttccagggcccggtcaagctcctcttttgtatgctccgccgtaataatggtgcggattctcgcttttccttgggcgaccgtcggatacacgatgctttgtgcaaacacgccgcgggtcaataaaaggtctgataatgcctgggctttttcttcctcccctattaatatcggcacgatcggtgtttcgctttttgtgagggtcagccccatttgaaccagtttgtctttgaaatacgccgtgttctcccatagcttttccatatgctcaggctcttccagcaggacgtcaatggcttctatgcatgcggccgttactgcaggcggatgagaagtgctgaataagaaaggacgccctttatggcgcaggtaatcgatcagaacctgcgaccctgcggcgtaaccgccaagcactccgatggctttgcttaatgtgcccacctgtatgtggactcttccgtcaagcccgaagtgattaaccgtcccccttccgttttttccgagtacgccggaagcatgcgcatcgtcgaccatcacaaaggcatcgtacgcctctgcaagtttgacgatgtcaggcaaaggagcgatgttgccgtccattgagaatacgccgtcggtgacgatcaggcgcatgcggtaattcattgattttttcagcaccctttccaaatcgtccatatcaacatggcggtacacctttttatctgcttttgtcagcctgatcccgtcaataatggaagcatggttcagttcgtcagagatcacgatatcttcttttgtaagaatgcttgataagacgccctgattcgttgtgaaccccgattgaaaaacaagtgccgcttctgtttttttaaaggttgccaattttttctccagctcattgtgcattgtgaatgttccggcgattgtacggacggaccccgtacccgctccgaattcttccgcggcgcgtttggccgcttcgacaagtcttggatgcgacgtcaaaccgagataattgttcgatgaaagctgtatcacgttttcccctttgacttccaccgacggaccctgcttcgtttcaatttgtttcatttgctgccacgttttattttctttcattttatcaagctctgcttttagaaattcaaattctttcattatagaaccctccccttatggaatcaaaatgactttgccgcactgtccctttctcatcaggtcaaaccctttttcaaagtcttcaagcggaaactgatgcgtgatcaccggcgtcagatcaacaaggccggattcaagcaggtgcgatacctgccgccatgtttcaaacatttttctgcctgtgatgccttggacggtaagtcctttaaacaccacgtcatttgtcaggtcaaccgtcaccggacgttccggcagactcagcatgtggaaccttcccccgttggccgccatctttaatccttgtgttatggctgccgggtggcctgacatttcgcagacaaggtcgatcccttcaccgcctgttaaggtgtcgatcacctcaagcggatcttcctcatcaactgaaatggtgatcgcagctcccaatttcttcgcaagagccagcctgtaatcatttttatcaatggccgcaatacgggatgcaccggccgctttagccaccgccaccgccatcagcccgatcggtccgcagccgataattgcagcggaaccgcccgcaagccggctgctttccagcaccgtatgcaccgcgttgccaagcggctcttgaacagaggcgacggcggggtccatatcagcggggtttttccaaacatttcgggccggcactttgacatattcagcgaaggagccggctgtatctacgccgaggatctttgtatgggtgcacacatgatgtttttctgttaaacacgggacacaagtaccgcagacgaagtgggtttcagccgaaacgtagtcacctattttgacatttgtgacgtgcttgcccgtttccgctacgataccgctgaattcatgtccgaatacttgaggtgttttgattcgtttctgcgcccattgatcccaattataaatatgcacatctgtaccgcatatagatgcggcctgtactttaatgagaacttcattctcattaatggaaggtatgggaatttctttcagcgttgctccgaaagcgttttcatttttaacgatagctttcatctttcctcccaacatgtacactcctcctcgaaaaaacactgtaataactggattgtaacatgagataaaaaggaggtaaacaccagtgtccactcgaggaaaacaactgcttccgtccggaaaaatgggcgggattttttttgaatattatatgaataaagccatttatcatctcttcgtactatcaatataatattgtgagaaaatatgacagcaataaaaacaacctgctcgccttacgcaagcaggttgagaatgtacatatttttgtttttaacggggttcgacgattaacttaatcgccgttctttcttctccgtcaatctgtatatctgtaaaagccggaatacaaatcaaatctacgccgcttggcgcgacaaagcctctggcaatcgcaaccgctttaacagcctggtttaaggcacccgccccaattgcttgaatttcggcggctccgcgttctctcaatacgccggcaagcgcgcctgctactgaatttggacttgattttgctgaaacttttaagatttccatttctgctcccccttagttttacaatggataagtgagtgttcattagaacaatcattattagatgttgctatccaaaaagccatccccacaatgcttttcaaaaatagcgggctaccttccatttctactatattcactaagaagttgctatattcctgcttttccttttaatatttttataaaataaacacatgatcacctattcaaagaacatatggtcatcattgattaatatccgttcgatatttacggcctttttcgtttgatcgtcgatgtcaatgagcactccgctcagcgtagttttaccttccgccaccgtaaaccggacgggaagattggttttaaaccgcttgatgaccgtttctctgtccataccgagaattccgtcgtacggacccgtcatgcctacatcagtaatatatgccgttcctttcggcaaaatgcggttatctgccgtttgcacgtgtgtatgggtgcctaccacggcagaggctcttccgtctgtataccagccgatcgcaattttttcgcttgtcgcttccgcgtgaaaatcaataaaaatgtacggtgtgcgctttttcgcttcttctattaattcatccgctttagcaaacggatcatcaagcggcggaagaaacgtccgcccctgtaaattaatgacggcaagctcttttccgttcgatttaatataagtaatgcctttgcccggcgtaccttccgggaaattcgccggccggacaagatgcggcacatcatcaataaagtcgaagatctctcttttatcccacgtatggtttcccattgtaatggcgtcggctcccgcttccatcaggctgtggtagatcttttccgtcagtccttttccgtgtgctgcattttctccgttaataattgtaaaatgcggtttatgtttcgctttcagtttcgggacatattcttttaccatgtcgcggcccggggaaccgacaacatctccgataaataaaattctcatacattccattccttccttttcagggactcaaaaaaataaagtgatgcgctaagcatcactttattttgcatactctacggctcgagtttctctgatcacggtcactttaatgtgtcccggataatcaagctcgtcctcaattcgtttacggatatcacgcgccaaacgatgggcttctaaatcattaatggagtccggcttcaccatgatgcgaacttcacggccggcctgaatcgcaaatgatttttcaacaccttcgtaagactcggagatttcttcaagcttttcaagtctgcggatatagttttcgagcgtttcacttctcgcgcccggtcttgcggctgacagtgcatcagcggcagcaaccagaacggcgataatggaagtcggctcttcgtctccgtggtgtgacgcaatactgttaatgacgactggatgctctttatatttggtcgcaagctccactccgatttccacgtggcttccttccacttcatggtcaattgcttttccgatgtcatgcagaagaccggcacgcttggcaagctttgcatcttctccaagctcggaagccattaaaccggctaaaaacgcaacttccatagaatgtttcagtacgttctgcccgtagcttgtacggaatttcaaccggccgaggatcttgatcagatccgggtgaagtccgtgaacgccgacttcaaacgtcgtctgctcacccatttcccggatatagtcatcaacctcacggcgggatttttcaaccatttcttcaatgcgcgccggatgaatacggccatcctgaacgagtttatcaagagcgattcttgccgtctcccgtctgatcggatcaaatccggaaagaatgactgcttcaggtgtgtcatcaataatcaggtcaatacctgtaagcgtttcaagcgtacgaatgttacgcccttcacggccgatgatacgtcctttcatctcatcattcggaagattgacgaccgataccgtcgtttcggcaacatgatctgctgcacagcgctgcaaagcaagcgacagaatgtttttcgcctttttatctgcctcttctttcgcacggttttcggtttcttttgtcatgatggcgatgtcatgtgaaagctcattttcaacccggtcaagaatgatttgtttcgcttcatcccgtgtcaggctcgaaatgcgttcgagttctgactgctgcatacgaatcatctcatccactttgctttccatctcttcaatatgttgttgtcgttcattcagagaatgatctttcttctccaacatcgcttcccgtttatcaattccttcatgtttacggtcaagattttcttctttttgaagtaaacggttttcttgtttttgaagctcatttcgtctttcacgaacttcctgttcagcatctattcgaagtgtatggatttcgtcctttgcttcaagcagagcttcttttttcagtgcttcagcatcacgctttgcatcttcaaggatttgctcggcagcaccgcgtgcgcccgcaatctttgcttcggcaatggttttacgaacatagtagccaacaactaaaccgagcagagtcagcaaaatggagatgagaaccgtcattggggtcatactttcacctcctcttgctatgaacttggtttttgcttaaataagtgccggcatgtacattgtctgattttctcaacatacagaaccttcacagggaatgagtctctcatgcccttgtcaagtttaaatggtttaacaatcatgttaaaaaaacaaatgttacaacttcattgtaattgtgtcggaaatacttgtcaagcttgccagcttaacgattcgccttcagctcggatcgccgcccatgtatatatcataccataccttcatccgcttttcgtgaatgacggctctgtcagtccgcctggttaagcaattggtaaattctattgtttacctgtcctaatttggcgttattctgaatgtttgacagtaatatgacatatttgcttgccgaatggctgaaactgtttaaaatgttgtaaccgggcataacaccgtgattggaatagctgcccggatcaatgtaaaaccccatcccgtaagcggcactgcttcctgctgtaaacatttttgtgaagctttcttttgaaaggagcgtgccgtttacgatcgctttatcaaatttataaagatcttcagcgctcatatacatgtcgcccgccccgtaaagctgcgataagtccaaaaggtgcggcgttacaagactgccgctctcatcgactttgtagccgacggcaggatatttggcttcagcaaatgttttgtaaaatccggcatgcttcattccggccggtttgaacacgtgttcttttatatattgttcataagactccccgctgacctgagatgcgatataagcaagcactgaatagttggaatccctgtaatcccaaaccccgggctgccttttaattccgcggtattctatatccttgattaaatcaattggagaaatcggtccccgaccctcaatatgcccgtttatgccggacgtatgattgagcaggtttttcaatgtgatgcgcgtgccgttaggaaaattcggcaagtatgtactgacggggtcactcgtctgcagcagccctttttcttcaagctgcaggacagccgtcgcgattaacgctttttgtgaagaaccgatataatatgatgtctccggattgtttttaattttttgttttcggtctgcatagccaaagccttttttcagcacaacttttccatcttttacgatcattgctgtgccgctgaacccgatctgttgcaagtaattgctgatctgtttattgtgatcgattgatttaggtgttttctctttttgcgtcttttcttttttctgttgagtctggtcttttgaagtatcagattgagcggcgggagcgtttttaacggattccttctcccgatgatgcgctgtgacggtccagatcataataaaaacagtgacaagcagcagaaaaagaaacagccctcccgttttcatcagcttcttctttctttttttatttattcttgtgcggcgggggctcgtcatcttttttcctcctcagatataatttcaactttcgccatgatgttagacgagtgaagggtgaaaaaagttgtaacattccagataaaattttccgaaacagccagtgtttttttgaaacatacaaaaaaaagagcggaaattgcttattccgctcttttgatcgtgtttttattcttctaattccatctcttcctgaacttcttccgctttgtccgttacaccgttattgtctaaaccgtaatattcacggatttgttcctgaatcatcagcatgatgtctttattttcttttaagaactgcttggcgttttcacggccctgaccgaggcgttcttcttcataagaataccacgaaccgcttttttgcacgatatccagttcagttccaaggtcgatgatttccccttctttggagattccttcaccgtacataatgtccacttcagccgtacggaacggaggagcgactttgttttttacgactttaattctcgttttattccccatcacgtcgttgccctgctttaattgctcggcacggcgcacttcaagacgcacggaagaatagaatttcagcgcgcggccgcccggtgtcgtctccggatttccgaacataacgccgactttttcacgaatctggttaataaagattgcgattgttttagatttattgatggcgccggaaagcttacggagcgcctgagacataagacgcgcctgtaaaccgacgtgtgaatcacccatgtcaccttcaatttcagcttttggaacaagcgccgcaacagagtcaacgactacgatatcaacagctccgcttcgcaccagcgcttcagcaatctcaagcgcctgctcccccgtatccggctgagaaagcagaagctcttcgatattgacaccgagcttttgcgcgtaaacaggatcaagagcatgctcagcatcaataaatgctgcctgtccgcctttttcctgaacctcagcgattgcgtgaagcgctacagtcgttttacctgaactttcaggtccgtatacttcaataatccgtccgcgcgggtatccgcctattccgagagcagtatcaagtgcaagggagccgcttggcaccgttgaaattcttgtatccgttttttctccgagcttcatgatggaacctttgccgaattgtttttctatttgcttaagagccatatctaaggctgcctgacgatcactcatttattttttcctcctttatcttgccactacatatactataccttgtttactggcatttgccaagaaaaaagcgaacgcatattcggattttttccgcgttcgcttttctgcaaaagagcataatttcccttatgaaacttaaaaatcagagaaaaaagctctttaaaactttatttttgatccagcatttttaaaatgagatggcagccgtatttagcggcgcgctttctgattccggttcttgagccggcaaagtgaaattcgtgcacctcttcttttccttccgctgaaatgccgataaagacgcggcccggcgcatgcccttcctgcgggtcgggacccgcgaccccggtaaagctgatgccgatatcgcttccggtcagctttctcacaccggatgcaagctctttcgcacactctttgctgaccgctccgctttctgcgagcgtctcagctttcacgccgagcacatgctgtttcacgctgtcggaatagcagacaacacctcctgcaaatagttgagacgcaccgcttaaatcagtcacccactctgaaaacaagccgcctgtaaagctttcggcagaagaaatcgtgattttgttttgtctgcatgcttttgaaagctccttcaccagggacgtatcatcatatccgtagaaaaattcaccgacacgttctaaaatggcggcttccgtttcttttaaaagccgttctgtttctttttcgtcagcatgtttcgccgttaaacgcagcgtgacctcgccgtcagcagcaagcggcgcaatcgtcggattcgtctgcgcgtcaatgatatcttctaaatcagcttcaagctgggattcaccgattccgaaaaaccgcagcacggttgaaacgattttctcattagaaccaagctttttaagaagcagcggtttcgcttcattttcaaacatcggacgcagctcgctcggcggcccgggaagcagcatataaagccttgagccgtgctctgcaagcattcccggcgccatgccgaaatgattcgccaaaacgtccgagccctcaatgacgagcgcctgtttgcggttattcggcgacatggtccgttttgttttcgcgaaatattcttcgatcgaccggaacgcttcgtcattcagaacgagcgggcgccccagtgtgtttgcaatggtttctttcgtcaaatcgtccttggtcggtccgaggccgcctgaaaaaataatcaggtctgagcgctcttcggcaatgcggatgacttgcttaagccgctccggattgtcaccgacagcggtatggtaaaacacgtttacaccgatttccgccagttctttactgataaactgcgcgttcgtattggcgatctggccgagcagaagctccgagccgaccgcaatgatttctgctttttttgctatttccatctttaagtccttcttccttagttagatgtttttaacgcatcccagttcttcgcaaaataatcccagccggaaatgactgtgaagagcacggccacccataaagcgatatcgccgaacgggaaagaaacgagctcaaacggaagattatgcagcaaaagcgcggcaacagcgatgatctgggcccatgttttaattttccccagcatattggcggctacaacttcccccgttcccgccagcacaagtcttaatcccgttacggcaaattcgcggctgatgatgatgatgaccatccacgccggcgcaaggtcaaattgcacaagcgtaattaatgccgcggacaccagcagtttgtcagccagcggatctaaaaatttcccgaagtttgtcacgaggttcagttttctggcgtagtagccatccacccagtcagtcgttgatgcgataatgaacaaaacagctcccgtaagatgcgcgaccggaatcgattcatcccctatatgaacgctgccccaatgaaaaggaacaagcatgataatcataaatacaggaattaaagcgattcttgccagtgtgattttattcggtaagttaaacataaagcccctccaataatatgtactcggacgtgaagaaaaagtcatcttaatcgttcagatgactttttccccttttattttttcatcttgattgtgatggtctgcgccatcatatcatgcggattgagttcataggacagaacctctccgttgattttaattttcaggttaggggcatagcccgtgcggatttcaatctgcttttgatccgtgacgtcttttttaaaggtttcgcctttttgcagcgttccttcttttaaagaaccgccgctgtcatcacggacgcggatccatgcgctgtcagaagcaatcagttcaagcttatacttatctgccccggagacgttgtatgaagaagccgagccttccgttccggccgctttgatctccgtcttttcactgcttttttctttctttttctgctctgacgcttttgtgtcttttttgctgtcagattgcgcttcgtcgtttgtattgccgtcgtttttcagcgcagaatccttaggaatctcatacttgctctcactttgggtgacggccttatctccgtctgtctgcccggatttgctcattccgaactgaataatcgcataaatgatcgcgatgacgataatgacaccgatgacgacaaggacggtcggaagccattccgccgcctttgaagcggacttaggaagctccctttgcatggcgagaccggagattttttccgacacatcgtcatggtacgtgttagggatgtcttttttatattcttcgaataactgatctgaatcaagcccgacagcttcagcgtactgcttgataaacgcccgcacataaaaattgccgggaatgacgtcataattgccttcttccagagcggttaagtatcttttctgaattttcgtcgccgcctggagttcatccaatgacatccctttttcctctctggcttctttaagccggattgctaattctgtcacaacaaacaccttccaatattaaaaatcaaagcttgaaaaaccggtctggtcaaacatttgcggttcttctgcatgttcatatgtaatgacttcgtcaggatcatttctgagttcgataatataatcgaaatcatcgagcgtatactccgaattttgaacaaaaatatcggggtgctccacgacctttgtcgccggaagccgcataatttcactgacgagctgaagatggcgctcagatccccgtcttgtcgaaacgatgccgtcgaggataaacacgttttccgtgctgtattcatcggcaaccagctggctccggatcgtttgttttagcagcgttgatgatacgaaaagccatcttttgctggcacaaacgcttgacgcaacgatggactccgtctttccgaccctcggcattccccggattccgatcagtttgtgcccttcttttttaaacagctcggccataaagtcaaccagaagaccgagctcgtccctttcaaaacggaaggtttttttgtcatcggcatcacgctgaatgtatcttccgtggcggactgcgagacggtcgcgaagcctcggttctctcaacttcgttactttaatggtctccattgtttttaaaattgattccaatcgtttaatttgatctatatgccggcatctgagcagcattccccttctggaaaggtcgacaccgttaattgtgacaatattaattgacagcatcccgagaagagatgaaatatccccgagcaggccggggcggttcacttgaatttcatattcaaaataccattcgagctttgccaaatgatataccccctccattgtggcaaatttttaccttcctttatcataaaacatttttctctaattagaaagaagaatgttgctctatagaggaaaacataaaaaaagagaggagaaatccccctcttaatgagtgctgttattttcaacaagcttcaccatcatatttgcgatggcgcgctgttcatcttcagaagcaacgctccaaagatcagcaagcactttttcctgatggtttttcgagtcgacttcgttcgcaaggtaaccgccgatttctgtcgcgaggtcagtgatcgtttcatcactcatccctttttcctgcgcatagttcaatctgtcgccaaggaaattcttccaattatcccagttttctaatactgacatgttgggttcctccatttcatctgttgttacaaaattattttgtccgtgcagatgcaaactatacacacatttttttcagcagtgccagccgccgtttacggataatatatgccccgtaatataggaagccttgtccgataataaaaaggccgccgcttcggcgatttcctccggcttcgccagccggcccgcgggaatttcctctgccaacgcttctttttcatcagacgtgaactgatcaagcatatttgtatcaacggcacccggcgagaccgcattcacgcggacgccgctcggagcgagctctttggcaagcgctttgacgaacgaatgctgcgctcctttgaccatgctgtataatacctcgcacgatgcacctgtttctccccagacggaaccgatcgcgacaatgcccccgctttttttccggatcatgccgggcaccagattacgcgccaaaagaaacggactcgtcacatgcagctgcaccatctcccgcgccgtgtcatccgtaacgtccgtaatcaggccgaaatgacttttgccgctgtttaatatcagagcgtccacaggctgcttaacggaacggctgagtgtctccgcgccatccggtgaggacagatcagcctggatagcggaggcttttacgccgaatgatgcgctcagcctttccgcaagcctgtgtgcggcttccttattagaatgataatgcaaaaggacgtcatatccgttttttgcgaggacttcacttatactttgtccgattccgccgcttgctccggttacgagcgctgtctgtttcatcaatcaatactccttctttccccagaaaaacatccctcagggcgtgagggatgttttgttatgattttggcacgactttgcagactgtcagcctgtcttctgatatttcttctttaatgacccgctttacgtcttccagggtgatctgctccagtacggttacgacatcaaacagactcatatctaaaaaggcgtagcgtgtgaattggttggcgatgtattcaggcgaattgagcgcttttaaaaatgacccgatcttcttttttctcgcaaggtcaagtttttccgcagttacggctgattctgcatcaagcagcatctgttttaattcgtcagcgagcttatccggctctggtgtatctcctccgacagaggcaaagccgaatccgtattcagccgtgtaatcaaagctgaaggtttcatcaatgtagcctttatcgtacaagttgccgtaatgcggtgagctttttccgaagagacattcaagcatgaggttcatgctgagctcgtgcttcaacagctcccgccccgttttataagggtctttcgcctttaaaccgacaagacattttgagccttgcacgttcatttttaattcctgctcccggcggaaaaccgcttcctgctcctgaacctctttacgtttgatttcaggctggtctgtaaacggctttttctcctggtttttccgcacctggctgatgatcgcttcaggatctgcggggccgacgataaagagcagcatattgctcggatgataaaacgtttcgtagcactcatacagcagatctttcgtaatatgagagatgctctccaccgttccggcaatgtcaatttttacggggtggtctttatacatattttcgataaggccgaaaaacagccgccaatccggattatcatcatacatattgatttcctggccgatgatgcctttttctttttcaactgatttttccgtgaaatacgggtcctgaacaaaatcaacgagtgtttccaggtttttctctacattagaagtgctggagaacagataagcggttcgtgtaaatgatgtaaaggcatttgccgacgccccctgcttactgaagtcctgaaacacgtcgccgtccgctttttcaaacagtttatgttccagaaaatgcgcgattccgtcaggcacgtgtaccatttcttccttatttaaaggaacgaattgattgtcaatggaaccgtactttgtcgtaaacacggcgtatgttttattaaaaccctgtttcggcagcacatagacatcaaggccgtttgccattttttcatgatacagcgtttcctgaagctgttcgaaatttatcggtttagtcaagatgctccccccgtcccttttaagaaataagtcgtatccagcttaatgttctttccgacattgataatgtcctcttttgtcactttctcgatattgtcgaggaaagtttcgatcggtatttccacttgggctgaagcctgctgatacagaaattccgctaagccgtatgccgtatcaatcgtttctaacacttggtttttaataacggctttcgtttgggcgatatcgtcctctgaaaagtcaccgttttgcatagcctgaaattgttcttcgataatggtgacggcctgcttataatttttcacctcaatgcccgacatgaccatcaaaagccctttgaagctttccacccttgaggctgcataataggcgaggcttgctttttcacggacatttataaacagctttgaatgagagaaacccccgaacagcccgttaaacacctgcaatgccggataatccggatctgtatatgtcgtattggtccggaatccgatattcagcttgccctgcttgacgtcctcttcatcaatgacttccttcggatcgggctgttcattcgtcttgcttctttcaaaaggctgcagctcccgttcttccgttttaaaatacgtatcaacggccgttttcacctgatctgaatcaacatcgccgatgacgtacaggtccagctgatcttcgcgtatggctttttgataggcttcatacaactcttgcggtgtaatgtgttcgacatcatcgaactcgccgttgacgtgaagggcatacggttcgcttttgcacatttcctgaacgagacgcagattagaatatctcatcttatcatcatatacggcttgaatccgctgtttcagcgtccgtttttcctgcgtgacataaaggggcaggaaggcgccgttttccaaagcgggcgaaaagacaagctctgataaaagctgaaggcctttttccaataacggtgtgcggtccttcagatacttttcgttaggaatctcaagtctgaacgtaatgacatgacgttctcccttttttgtcagatcagctgaaacggatgtgccgtacagctcatcaaaataagaacgcagatcagcggttttcgggcggctttctgttccgcgcagaagcacatgcggaaacagcgccctttttgttacgagctctttcgttaaaggagccagcattttaaacgtcagcgaaacggttttaaatttctcagtctttacgatgtgggcggtgatcccgccgtgctttgacttcatttcatttacgtaagtcatgtgaaacctccttcgttcattctttaatagtatgtattatggccaaatttcaggattcgcaaaaaagagtgcgcagatgtaattatatcaactggaggatttataaggaaacaaaaaacctctgcccgaaaacaggcagaggcattgaacgttattttttcaaattgaaaggccaccagttggctcttccgaatattttcaccatgaccggcacaaaaaacggaaggacgacaattgcgtacatgagaaggcctgttaataccacggttgcaatctgtaataaggaaagaacgcctgacggcagcatggccgcaaaggttcccgctaaaataatcgccgcagaaatgatgacggaacccatatttttcatactgctgatcattgcgggttccgttccttcttttttcagctcattaaagcggtccattaaaaagatggaataatccacaccaagagccatcaaaatgacaaagccgaagaacggcacggcccagtttacgcccggatacccgaagaagtgtgtaaagatgtattccgtcacgccgatggatgcgaaatacgtcagtacgagcgacgccactaaataaacaggcataataagagagcgcagcattatgatgagaatcagaaaaattcccgccagcataaacattgccgtccgtttgaagtctgaatccgatacttctttcagatcggcattcatgctggagactcccgaaacgccgaaagaggcattcttcagatccgtgttcggaatggctctttttacgctcgctttgatcgcttgaatatcttgaatggccgtatttgagtaaggattgttatcaagaacgacggtcaattctgtcgtttttctgtcatctgacatgtacgtattaaacacgcttgtgaaatcactgtttgtcaacgcgtctttcggcacaaaccagcctgtcatttctttatctgaggccttgtgaagctcacccaggtaatcattcgcccccatcatgccgcttgatactttcttaagcccttttacactatcgttaaggcctgaagaaagatcgctgagccgggaagaaaaatcaccgagaccgctcttcatttttttctggccctccgcgagctgtcctgccgccgattcaaggcgcggcatttgtcctgcaagagccccctgtccgtctgacacttgctgcagaccgttttcaatactggtcagaccggtgatcattgcgttaatttgagtgtcgatctttttttgagcggctgccagccgggcaaattgtttttccgcttgctgcagatgatccttttgactgtcgacctgtttagaaaacgcttctgcatccgcgtttgccttggaaacggctgactgtacacccgtaaaggccgatttgatttctttgtaagagggatcggttttgactgacggtattgacgcttccaattttgcaaacggcagccgggcaagctgcttgttcaaatcggcaagctgtctgctggtttcatctttcatcggcaggacggtttttaccaattttaaagcgttttgcgtttctgaagcgagaccgctgttttgtttgagctgtgaagtcagcatttgtttttgctcttcaatctgctttctcatctgggcgacgccggctttattctcattcacgcctgcctgcagtttattcaggttttcgcctatatcagaaagcccggatttcagagacaatgttccgttaataagctgattgacgcttttccccgactcttcgatctgcggctgtgaatcagctaacgactttgcggcatgccctaatccgtccgtgattttttcaagtcctgtattgcctttatcaagcccttcttgaagctgctttgcctgatttgtgacaaataattgattcaatccgtttccggcagggcgcgtggcgcttctgaccgtttttacaccctctgttttttcaagttctctgctgattttttcgatatcaatcaggtgtttttcggtatttagaggctcatcatttttgatgacgactgtggccggaagaagctcccccgggccgaatgcgtctgaaatcgtattaaacgcgcggacggattcatatttatccccgatttcgtcaaggctgttgtaagatagcgatcctttgtaaagaaggatcggcgggacggtgaataccgcaacgattgcaagactgatgagcggccttttaaatgaaaaccgccctgccgtttcccatgctttactttgaggatgggaaatatcacccttaacgggccaaaacagtctttttcctaaaacagccataaaaaacggcacgatcgtcatgagcgcaagcagcagcaccgcgacaccgactgcaacggcggctgccgactgatacagcttaaatgtcgcaaacccgatgcaggcaaatccgatcagcaccgcaccgccgctgtacaaaaccgtctttccggccgttttgtaggtgacgacgatcgcctctcttatatcagcgccatgcgacagttcttctttaaatctgctgagaagcagaatgcagtagtctgtgccgattccgaacataatcgcaaccatgaaaatctgcgtaaaagttgagagcggaaaattcagctggtcgactaaaaatgcgacaatcgactggctgactaaataagatatcaatacagataaaagcggcacaaacggagcgaccactgaccggaatacaaggatcagcacgatcaggataaaagcgaccgttatatattcagtctttttcaatccgtcctgtgagctttttaacacatcttcatcgatcagcgactggcctgtaatgccgtatgatacgccgtacggtttcagctctttatcaattttatttttgatttcgaggatatcgtttttggatgtatcaagctgcagctgaacgagcatcgtttgtctgtcttttgacagcagctgttttttgatgtcgtcatttttctccccgaagtatgaagtcaccgttttaatctgaagcgcttttttctgttcagacaaagtgctgacggcttcttccagacgatcttttttgtctgtcattaagcctttttcgtgaaatacgatgacggcagaagaagacggtgcatctgaatcagacatttcatcaagcaattcatgggcataagaagaggaatatccgtccggtacggaaatctgccctttctcccgtgtcaattcagccatatcaggcgctgtaagcataaatatcaccgttgcggcgatccataccgcggcgatgatccagcgggctcggataatgtttttcattatgtctgctgatcctcctctgtcatcatcaatcgatataatttttcatatgtattaacgaacatctccgcctcgtcttcatcaaaatacataatatatgaacggacgagttcctcaatccgccgctccacacggtgaaatacttccgtccccttttccgtgacatttaaaagtatgctccggcggtcgctttggctgcgttctctattgatgtagcctttttcatacaggcggttcgtcatcgatgtaatggcgcttttgttgacgtggcacaccgcggccagttcaattgatttgcaatccggattgagcataatatagcggagtatgtaatattgatccaatgtcagctctttgttcactttttcagcgataatgctgtcaattttttttaagacgtgcaggtatacatcggaataacgctgaatcagctgctttactttttcttcatgcatcttttccccctccttccaatagttaaaatgtttaactattaaaaaggataacgacttgacgatatcatgtcaatcttcaaaataaaataaaaaaagacagtgcagattacaccgtctttaatgattcctttttttcttttgcttgtgatgagatatttaacagcgctaaaaatacagacacaatgccgcaaaaagcggataaaataaaaatcagccagcctgcatttgacatcagggcagcaaagatcggcggtcccgcagctactccgataaaccgcatgctgttataaaatgaggtgatggttcccgattcctcgttgtctacgccttctgtgatgacagcgtctaatgccggtaatgctattccgataccgataccgctgacacacaaaaagataaataataaataaaaactgtgattccaccataggccgataaacgacagtgtcacggcactcattccgaaaacgatgcagaacttcattttgccttggtctttcccgatttttctgcctgatatatatgaactgacggatagaaataaaagcgggattgccaaaagcgctcctttagccacaccgtcaattccgtatttcttctccagtgagtctgataaataaaaaagaaccccgaacagcaaaaacataatcacgcagccgatgataaataccgtaaagagccagcgtccgtcacgcttaaatatgcggccgacattttttacaaattcggaaatagaaggggcttctttttgtttctccggctttgccaccaaaaacaatacgagaaaaaaactgataagcgaaaaaaacggaatgaaccaaaacggcataaaccaaaaccatgcagccaagagcgacccgagaatcgggcttaatactttcccggccgtgtttgacgtctcaatgtcgccgagccccgcggtaatccgctcatcatcccctttgaataaatcaccgataaacggcatcactacaggagccgcccctgccgaaccgattccctgcagcacccgccccgccaagataatgggataaggatgcttgaacgcggtggaagctatcgcggcaagcgctccgcccgcaccggctatgagaagacaaggcagaagaaccttttttcttccgaatttatcggacaaatatccggcaatcggaatacaaataatcgccacaatcgaatagaccgttataattaacgatacttgaaaagacgatatggacagcttcttttcaatcatcggaagcacaggaatcagcatggaattcccgagtgtcatcacgagcggtacagaagccagagcaatgatattttttgttccatttttcttcttactcaacttattcacccattcactatacttggttgtttcctgttttattgtgccttgcggaaaacaaagtatgtattgaagcggcaaataaaaaaacagacacatgacgcgtctgtcttaaaaacgttttcttacaacatgaaaactgaacttatcagcccggaaataatttaatgaatacagcacaggttcatcattctgattatagtgggtttgcttcagcaataaaagcgccgtctccggctcgcactccaaaaccggtgaaatcgtatcgtgatatccgatcggttcgatatcggcaacggcatagctgatcacagacccggagtttttttccaaaagatcaaaaatagattcctgttcatgacagaaagaattcggcagaatgtgcatcggaatcgtatctaaacagtaaacgaccggagtgccgcttgccgttctcacgcgttccaaataaaaaagctcctgctcaggctcaagccggaatctagcgatatcttcctcagacggcgtgatgacctgagacgacaaaaaaatcgtacccggcaccatgttcgcctgctgaatcattttcgtcacgctgttgagctgttcaatacctgaaagaaacagcggttttgtatggacgaaagtgcccacaccgtgccttctgataatcacatgctcctcttcaaggatacgcaaagcttcacgcagagttgcccggctgacacccatagattttgaaagctcaaattcagaaggaagcttttccttttcggtgtaaattccgttttgtatatcctctttgattcgctcaatcacttttaggtacaagtgacgattgtcagcttttgtagacatgtttcccctccgtaaaccactttcataaattattgaacaattgggacaactatatcatgttttaataaaaaaataaataggaatgattttggtgatatcattttcagtgaaaactctctcctttttaagaagagagctcatcatattgttccttagataatagtacttccctcggtttgcttccttcatacggcccgacgacgccccgttcctccattgcgtcaatcagacgggcagctctcgtatatccgattctgaaccgcctttgaagcatggagactgatgccgtctgcatgccgataatcaaatcgaccgcttcgtcatagagatcatccgttacttcactgtgtgtttccgacacttcttccggaatcatctcttcttgatactgcgctttttgctgcgtaatcacatgatcgacgacatgctcaacctcttcatccgataaaaatgctccctggacccggacaggcttattcgcgcctacaggcagaaacagcatgtctccgcgccccagaagcttttcagcgccgcccatgtctaaaatggtccgtgaatcggtctgagatgagacgctgaaggcaattcttgacggaatgttggctttaataacaccggtaatgacatcgactgaaggccgctgtgtcgcgataatcaaatgaattcccgccgcccgcgccatctgtgaaagtctcgtaattgaatcttccacgtcggaagaagcgaccatcatcagatcggcaagctcgtcaacaatgacgacgatgtacggcagctcaggctgcttgacttcttcttcggcatttgaccgcttaatatggtcgttatagccttctatatttctcgtacccgtatgggagaacagctcatagcggcgctccatctcattgacgacctttttcaaagcctgcgaggcctttttcggatctgtcacgaccggcgcaagcagatgaggaatgccgttatacacattcagctcaaccattttcgggtcaatcatcatcatcttcacttcatgcggtttggccctcatcagaatgctcgtaataataccgttgacacagacgctttttccgcttcccgttgcccccgctacgagcaggtggggcattttgttcagttcggcaagcacggcttccccggaaatatttcgtcccaagccgatcagaagcttcgcgtccggcttgtcattgagcttggattcaagcacttcttttaacgaaaccatcgcaacttcagcattgggcacctcgatgccgattgctgatttgcccggaatcggcgcttctatccggatatccttggcggcaagcgcgagcgcgaggtcatcgctcagattcacgattttactgactttgaccccgacgtccggatacacctcatattttgtgaccgccgggccgagatgaacttgggtcactttcgcctttaccccgaagctttgaaaggtccgttcgagttttcttgcattctcgtaaatgtttttcttatcggtctgctggccggtatgtttcgggtcagccaggatgtccaatgaaggcatttgataatctttattttcaagctctgtaaacgtcatcggcggagccgcagccgtttcgtcactgtcttgagcgccgccggaaggctcatcttttgccgtttgcgccgtctcctgcgttttttccggaatcagcggttcgacgcgttcttcctgacggtctgaaaagcttgaaataatcggctctgaatggatgatcggcgaaatgatttcctcatcctcttcttcgggctcaggcatttcttttttcttctgaacccgtttttgttttttgcccgatttggtttttgttttcggcgaagacatattcgttctgaccgttttcatatcctcaagaaatgcctgccattgaccgcggataaaccggccgacggggctcgtccactttttgagcgtttcctgcagtgaacgccccgttacaagaatcagccccattaagatcagcacgatcgccatgatctgtgaacccgttgatgcaaataaaaagtgggaagctgcaaacagcaccgcgccgatcatgccgccgcccaaatcaggggaagcagcctgctgtttcatgtcaatcataaacagctcccacgtgttgccgatgacacttgccgaccgaatcgacccgtgatgagacagatttttaaagagctgcacgtgagacagcagcaaaatactggcgataatacagtacaaccctgcctttctcctcgttaaaaggcttggactcttctttttccaaaacagcgaaattccgagaaggaagagcgcaattaagcataaaataaaccactctccggcaaaaaaacggaacaagtacacaaatgtctgtcccacaacgccgagctgcaaaacagcaataatcgagattgcaacacagagcagtccgcttagttcgtattttagattgagcttactctcttgtttctttttagatttccgttttttctttgccacactcatcaccttactgcgttaaaaaatgtaaaatcatacatcatgaagaaaagcagccttttgccggctgcatttttctgtaggattcccctattatagcatattttgcccccgagaaacggactgaatgccggttagattttcagcttgattttttgtcccggagcgatgtccggattcagaaaatccatcgggttcgtacttaaaatctgtacgacttcagcttcatttcccttcatctcaaccagcagcggcacgccggcgtaatctacctgttcatgcacgctttgctctatatcctgaccgtaaacgacttcttgtggcatgacggtataaaggatcattgaatcatccttccttcctcgccctttcgttcctcaatcagctgattcagcttttttatcgcctgtccgacgccgcccacggcatcaattaatccgtaatcagccgcatctttgccgactacgttcgttccgatgtccctggttaagtttccttttgaaaacatcagctctttgaatttttcttcggaaatatttgaatgatgggtcacaaagttgacgacccgctcctgcattttatccaggtattcaaacgtttgcggaacgccgataaccagacctgtaagccgaacggggtgaatggtcattgtcgctgtctccgcgataaaactatgatcacatgacacggcgatcggcacacctatggagtggcccccgccgagtacgattgagacggtcggttttgataaggatgcgagcatttccgcaatcgcaagccccgcttccacatcgcctccgacggtgtttaagatgatcagaagtccttcgattttcggattttgctcaatggcgacgatttgcggaatgacatgttcatatttggttgttttattttgcggcgggagctggacgtgcccctcaatttggccgatgatcgtcaggcagtgaatattggtatcttgggacatttgcggcagagatgtctctcccagctgctgaattttgctcataatgctgtctttcgcatctgatttttcgggctgctgttcttcggtgttttccatacgatgatccattttatctttcaccctttccgaatgtctctttgtattatgaacaaagatgatgatttccatccgggacatgaacaaaaacaaagccggagcatcatgcgctccggctttgtatacattatacttccataatgatcggaatgatcatcggcttgcgttttgttttttcataaaggaattgattcagcgcatcacgcattgcttgtttcagcgtggaccattctacggcagatgtttccgtcgcttcagtcacgatagagcggacgagctcagtagcttgtacaattaacccctctgattctctgacatacacgaaaccgcgcgtaatgatctcagggcctgaaacaaggttcttcttctgcttatcgagtgaaatcacgacgatgagaatgccgtcttgtgacaataagcggcggtctctcagcacgatgttgccgatgtcgccgactccgaggccgtcaatcagaacgtttccgtatgtgactttatccccgattttcacattctggccgcggaattcaacgacatcacctttttcaatcaagaaaatgtcgctgcgtttcatgccgatctcttctgcgattttggaatgcgctttttgcattctgaattcaccgttaaccggaattaaatatttcggtttcagcaaattaagcatgagtttcaattcttcctgcgaaccgtgaccggacacatgcactcgtttttgggcgaaaatgacttgagcgccggcgcgggcaagcaggttgacggttttggaatatatcaattcatgccccggaatcggtgttgatgcaatgacaacggtgtctccttcttcaatgttaagctgcttgtgcgcctgcttggccattcgcgtaagagcggccagcggctcaccatggcttccggctgtaacaattgccacgtcccgcttcggatattttttcacatcctgcacaggaataaacatttcatcttcggcttcaatatagccgagcttgcgtccaagctgaagcacgttttgcagattttttccggcgattgcaagtttgcggccgttctggacggcagcctgtatcacttgctgaatccggttgatattagacgcgaatacagcaatgatgacacggttttctgaattgttcatcgcatcggaaatttcaccgcttacatatgcttctgacggagtataccccgggcgctccgcattggcgctgtcagaaagcagggcgagcacgccgctgtttccgattttggcaatttcgccaatatcacatgattgatgataagcaggcgtctggtcaaatttgaagtctcccgtgcatacaatagagccaagtgatgttttgaagctgactcccactgaatccggaatactgtgaatcgttttaaagaacgatactttcgttgattcaaatgtaatgactgatttagagtgaacttcacgtaaatcagcttttcgattatgcccgtactgcttgagtttttctctcagtaatgcaagcgtaagcttcgttccgtataccggcaccgacagcttgttcaataaataaaagacgcccccgatgttttcatcgtgcccgtgtgtcagaaagatggccttcacgcggtcagcccgttctactaagtaggaaatatccggaatgacgacatcaataccgagcatttcattttcagggtgcatcagccccgcatccactacaaatatgtctgagtcaatttcaatgacatataggttcttcccaatttctccgacgccgccaagggcgataattctgacgttttctgtatttttctttttcaaaatctgtatcctcctagtctcatacccgtccatcatcacttgttcctattataactgatatcaattttagaaaacaagaagaagcggaaggtttagggaaaaccaatatgtatacaaaacggtcaaactcacgataaaaatgagaatgaccgcgtatttcaactgtataaattttttcttacagttcgctgatgacgctgctcaggctcagacgttcatcttcattcagcgggataagaggaagacgcacagatccgacatcaaggcctttcagctgcagcgccgttttgaccggagccggattaggcgctttaaagagctccttcatgatcggcagaagcttctgatgaatcagtgccgcggttgccgtctgcccgttcgtatagtttttaatcatctgctgcatgtcagaacccacaatatggctggccactgacacgactcctcttccgccgactgcaagaataggaagcgttaacccgtcatcacctgaatagacgtaaaaatcttccggcgtttcggcaatgattttcgtaatggcatcaagatcgccgctcgcttctttaatcgcagagatattcggaatctccgcaagtctgatggccgtttccggcgcaagcgaagcgaccgttctgcccggcacgttgtaaagcatcacaggaagagacgtttcttcagctatggctttaaaatgacggtacatcccctcttgggaaggcttattataatacggcgtgacaagcataacgcaatcgacgccggcttcttcagctttttttgtcagtttaatggaatctttcgtattgttgcttcccgtacccgcaataacaggcacgcgtccgttcacttctttgactgtaaattcaaagagtgcaattttttcttccgttgaaagtgtcggggattcgccggtcgtgcctgcgacgactaaagaatccgtgccgtttttcaacaaatagtcgattaatgtagacagtttttgaaagtctacattccctttactgtcaaagggggtaatcatcgctgtagatatatttccgacattcatttttttcacctcatcatgattcaatcacatttactttgaaagttcaaacacttcatgcagcgcatttacggccgttaccatatctttttcatgaacgagcacccagatcgtcgtatggctgtcggcagattgcagaatcggaatgcctttatcagaaagtgcggagacgatttttgacgtgacacccggaacacccattattccggcgccgaccgctgacactttcgcacagctttccgtcactgtcggctcatatcctaattcagccaaaatgctgcgcgcggcttccgttttactgccggctacggtatatacgatttcactcggcgtaatgttaaagaaatctacactgattccggcatttgccattgctttaaagacttcagtctgaacgttgtattgccccattttggcgggaaccttaaattgcgtcacgtctttcacatgggcgatccccgtaatcagccgttcgaatacatcgctgccgatgttagacgaatgatgggacgtcaccaaagtgcctttgtcttttgaataagtggagcgcacgcggatcggcacctttgcctgcatggcgatttccaccgcgcgcggatgaatgactttcgcgccttgataagcaaggttgcagatttccgtatatgtgacattcggaagcggcttagcattttccacgattctcggatcggctgtcataacaccttccacgtccgtaaaaatgtcgataaactcagcatcaaccgccgcgccgagcgccgccgctgatgtatcgcttccacctctgccgatcgtcgtcgtgtcgcctttttcagtcgctccctgaaagcctgcgacaacgacggcatcatggctggcgagtgcagcgaaaagccgctctgttttcatttctataattttggcgtcagtatgctgggcattggttaaaaagccggcctgagctcctgttaaagctgcggcttttatgccgttttccttcagcatgctggaaaaaacaacggacgaaatcgtttctccgcaagacagaagcatatcctgctctctcggagaaatgtcggactggctgccgtaaaggagcccgattaaagaatctgtcgcgtacgggtctccttttcttcccatcgccgatacaacaacgacaaccttataaccttcacttatggcatcttttatgtgtgctagcgcaagcttgcggcctttgtcatcttttacggatgttccgccgaatttttgaacaatgatcttcactattttcactccaaattagtctgacgtaacagaagagagcaggcagagccttactctcttctgttcgcctatagaaaatacgtttgttttatacgaggttcagtttttgcaggctttccgcgatttgaactgagttccaagcggcgccttttaacaggttatcagaaacaacccacaaatgaaaaccgtttgctctgtccaaatctttccgaattcttcctacaaatacatcgcgtttgccgacgcaatcagcaggcatcgggtaaagctgctccgccggatcatcctgaagcgtaacacccggagcttcttttaaaagctgtttaatatcttcaacggttgcgtcatcacggtcaagctcaatgtaaacagattctgaatgccctgtttcaatcggcagtcttacacatgtcgcagccacttccagcttcggcatatgcatgatttttttcgtttcattaatcattttcatttcctcaaacgtatagccgttgtcttggaatttatcaatttgcggaatggcgttaaatgcgatttgataatgctttttgtcgcctttaaccggcataatggacggttctgcgggttcattgtttaaaatcgcctttgtctggctgtacaattctttcgccgcttcattgccggctccggacacagcttggtaagtagatacaatgacttttttcaaaccgtacgctttgcggatcggttcaagcgcagccaccatctgaatcgttgaacagttagggttggcgataatgccgttatgtttgtgcagatcaccttcgttcacctcaggcaccacgagcggtgtattttcgtccatacggaatgcgctcgtattgtcaatcacgatggctccccgttttacagcctcaggcgccaagctttgtgatacgcttccgccggcgctgaataacgcgatatgaacgccttcgaagctttcaggaacagcttcctgcactgtatattcttcgcctttaaacgttactttcgtaccagcagaacgctttgaggatagtagtgtgagtgtttcgatttcaaagtttctgtcttccagtgttttcagcatttgctgtcctacggctcccgtcgctccgacaactgctacgtgtaatcctcttcccatctgtaaaactccttccgccaattaagcatcatttgttgaattgactttgcattttacgttttattttaccatagaatagtcacggattgaccgaatttttttattccggaatgattttctgtcatcatgattttttattcatgatggtgtacgagcaccggctgaacctgctggtgcaaaagagctttttctaccgtaatcggaaggagatccattctggcgacgagcgatgtcggttttttcacgtggtcatcctggccgaacgggatgaaatatatgttttttgcggacatcagcctcattaaattcgttccgtttaaaccgagtccgtcatttgtcgaaattccgagcacgaccgggcggccgttgcggatcgtggctttcgcagccataaggacggggctgtcggtcatcgcatttgcgagtttgctcattgaatttccggttaaaggggcgatgaccatgcagtcgagcggaagtttcggcccgagtggctccgcttttacgatggaatcaatcgcctcaaagcctgttgtttcttcaatttttctgacccaatctcccccctccccaaagcgggtatcggtcgattgaacggttgatgtcacgaccggccggacttcagctccttgactgataagcgcctctatttgcggaaacacttcctcatatgtgcaatgcgagccggttaatccgaatccgattcttttccctttcagagacatggttatttcccctctttctttaagtctgccaaaagcttgctcaatacgttcgcaataatctgtccggctgttttcggggccacaattcccggaagacccggagcaagcagcgctttaatgccttgtttttcagcatatttgaaatccgttccgcccggacgggatgctaaatccaaaatcaaggtcttgggcgtcatgcgcgataaaacgctttgattcagaatcaagctcggtacggtgttaatgcagatatcaatatcatttacatgatcagtaagctcttcaagttgaaaaggagaaagccccatttccgatatacgggctaaatgagccgaactccgcgcgcccacttttactttcgcccctaacgctgcaaacgtccgggcgatcgtcataccggtgcgccccatgccaagaacggcgacatttgatccgtgaatggtataatccgtatgctgaatcgccatcatgattgttccttcaacagtgggaatcgagttgaatatcgcgatgtcgtcccgctcaaataatttcacaagcttacggccggcttcgctggcgatcccctcaagatacgcgttggagatgcctgaataaatgacgcaatgctccggtgtccgctcaagatagctctgctttaataccacttcttcatttgaaaaaaccgtggaaacaacgccttctccggtcgttgccgatacaggcaggatgatactgtctattttttgaaagggaatctcatcaattttgcatttgacggttcctgtaaaaccgtcatccaattggtcaaaccctgcaagataaatatcggcatgctgttctgtcagctttcttataatctcaagctgtcttgcgtcaccgccaatgatcgcaattgttaatccggttaacatctgaaacgttcaccttctttacagttactggatcctttaagtgtcatcctcctcttcatcgtatgtgcaaagagaaagggcggtgaatgtacagcgtctttttcataaaaaaagcaccggctgtatgagccggtgcttgcaaaaaatgaataagatctactcttcgggaggcgtgatctcccccggaacgtctaaaatgatcatgtctgacccgattttttggatatggttccaggggacgcggatgtcgtggccttgttttcgcagtccgaaccattttaccgtcggtatcaacagcgcggtaatttgtccgtcctgttcattaatttccaaatcggtctggccgagcacgccgagccgctctgcccgtttaatatccacaatttctttacctgacagttcactgagcctcatgatagccacccccttgtactatatgacccggagcaaaaaaaaatgcctgccccgtacagaggcagactgctttgcagcttaagacgaggccggtatattgccggtcgggctgatgagcgatagtgcgtaatcatccgtaaataagcggcggctgaggccgttgacgctttccaggctgaccgcatttaattcagcgataatttcatccatggtcttatgctttccgagcaggagttcatttttcccgttccggctcattttgctgtttgtgctttctaagctgagcattaagctccccttcatttgctctttgctgttttccagctctttcggggtgataccgtcacgttttagaaccgataacgtttcctgaatggtttcagacagaagtccgagctgattcgcgccggtgcctccgtaaatcgtcagcataccgctgtcttcataggaactgtgatagctgtatacagaataggccagtcctttatcttcgcgcacatcctggaaaagacggctgctcatgcttccgccaagcacgttgtttaagacgatcaaatcgtaaatgtccggatctccgactttcaggcctttgaaaccgagacagagatgcgcctgttcggtgtctttttttctcgtcagcttttcataatgaaactcaggctcgctgatgccgcttgctttgcccttcgcttcgtatgtaccgaaccatttctccacgtctttaatgaattgttccgttacatttccggcgacagaaatgacgacgcggtccggcgtgtaaaagtcatccatatgctgtctgagagaatcgccgttaaacgacgaaagcgtttcctccgtcccgagaatcgggtatccgagcgaatgattgccgtatgtcgctttgctcagcagatcgtggacaatgtcatccggtgcgtcttcatacattttgatttcttcatatacgacgttcttttcttttttgagctcatcttcgtcaaaagcagaatgaaagaacatatcagccagcacatcaagtgcgtagtttgcatgctcatccagcactttggcgtaatagcacgtatattcttttgaagtgaaggcattcacttggccgcctatccgatcgaaggattctgcgatttcacgtgcggacctggtatttgttcctttaaaaaacatatgctcaagaaagtgcgaaataccgtttgtctccggcgtttcatgacgtgatcccgtcccgatccatacgccgattgccacagaccgcaccgttggattattttcaagcacaactcttacaccgttttggcatgtatagcgttttatcaagtctgttcctcctattcaaagacaggcagctgcctgctacttcatcagcctgttttcatccattaagtcagacactgagccgagcgcgtagcctttttctttgatttttgcaatcagtgtatccaggcttttcgcagtcggatcagtcggatgcattaaaatcatggctccgttatgtattttgctcagcacccttgtttgtaaaacagcgggagacggtttttgccagtcaatggtgtcaacggtccacatgatggtgcccattcctttttccgccgcaaggtcgaccacggcttttctgaagctgccgcttggcggcgcaaaccatttcggcttcatgccgagcgtctcgctgatttgtgcattggttttgtcgagctgttcggaaatgcttcctgaagtcagtttgctcatatcagggtgattgtatgaatgatttccgatttcatgtccgtctgccgctatttttttccccagttcctgattgtttttcagccatttcccttcaagaaagaaagttgctttgacctggtgctgcttcagaataggcagcatttgctccacgtattcatttccccaggcgacatttatcaggaaagcgaccatcggtttgtcgggatttcctttataaatgggttcgggcgcgagagaatcaagatggactttcggctttacctgctcatagacaaggtcgtcttcgtgaaattctccgtcctttttcatttgtttataggatttttccacattgacttttaaaccgttatatcccggtatactcttccatattttatcaatccgagcgtcttgcggcttcacttcatactctgacgctttttgcagtaattcttcatagagcggatcttttgatgatgacacagttaccgcgtcttttttcattgcgtctatgtaatcaactgtatacgggttttttaacatttcaaacgaaacaaaaaaaagaaataaaaaaacggcaaacggcacgaattttttcaacatgtccttccccctcatcacacattatgtatgaggaggacaaggtagaacccgtctgttgtctttctcaaaataaagaagccgggtctcccaggctccttgttaggttttcatttaagattgttgttgttcctgttctttttctttctcttcgcgcagcactgctttacgcgacagattcactcgtccctgtttgtcaatttcagttaccttcacaaggatttcgtcaccgattttcacaacatcctcaaccttgccgacccgttcgagcgctagttcagagatgtgaacgagaccgtcttttccgctgaagatttcaacgaaagcgccaaatttctcaatccgtttcactttaccgaggtaaagctggccgacttcgacttctctgacaagatcttcgatgatttttttcgctttttggttgctgctttcatcagtagaagaaataaagatggtgccgtcttgttcaatgtcaattttaacaccggtatcttcaatgattttgttgatttgtttaccgctcggtccgataacgtcacggattttatccggattaatggtcatcgttaaaattttcggcgcatattgagaaagttcttttcttgattcaccaagcgtgctgagcatgctgtccaagatttccattcttccttttttcgcctgctgaagcgcttcttcaagaatttctcttgaaaggccttcaattttaatgtccatttgcagcgctgtcacgcctttttccgtgccggctactttaaagtccatgtcaccgagggcgtcttccatcccttgaatatccgtcaatactgtatagtactcgcctgatttcacaagtcccatcgcgatacctgcaacaggggctttaatcggaacacctgcgtccatcatggcaagcgtacttgcgcagatgctggcctgtgaagtggaaccgtttgattcaagcacttcagatacgaggcggaccgtatacgggaagtctttttcattcggaatgaccggctcaagcgcacgctctccaagagcaccgtgaccgatctcacggcgtcccggtccgcgcatcgggcctgtctcccctacgctgaactgcgggaagttataatgatgcataaagcgttttgactcttccacgcctaaaccgtcaagaatctgaacgtctccaagggcgcctaatgtacaaacgctgagcgcctgcgtctgtcctctcgtaaacagcccggatccgtgcgttctcggcagaagaccgacttctgaagaaagcgggcggatttgatcaacgccgcggccgtccggacggactttttcttctgtgatcaaacggcgcacttcgtttttcacgagtttagacagtgtctgtttcacttttttaattgtatcttcatcatgctcttcttcttcgaatttcgcgacaactgcatttttcacttcattgatcgcgtcttcgcgagcatgtttttcgtgaacctgaatggcgctgagaagatccggctccgcaaggctttttacttttgcgctgagctcttcgtcaatttcatacagttcgatctctgttttctctttgccgactgctgcgacgatttcttcttggaatgcgatcaggcgcttgatttcttcgtgaccgaacataatcgcctcaagcatgatttcttcaggaacttcatccgctccggcttccaccatgttgatggcatcttttgtgcctgcaacgatgaggttgatatcacttttttcaagctggtcaaccgtcggattgatgacgaatttcccgtcaatgcggcctaccgtcacacccgcgatcgggccttcaaacgggatatcggaaacgcaaagagcgagtgatgaaccgaacattgcagccatttcagatgagcagtcctgatcaacactcatgacaatgctgatgacctgtacttcgttacggaatccgtctgcgaaaagcgggcggatcggacggtcgatcagacggctggctaaaacggccttttcacttggacggccttctcttttaataaaaccgcccggaattttacctactgcgtataatctttcttcatagttaacggtaagcgggaaaaaatctagcggtttcggttcttttgatgcggttgctgtgctgagcactgcagtatcgccgtagcggaccatgacagcgccgtttgcctgtttggcaagctggccggcttctactgtaagctgtctgccggcccaatctatggtaaagacatgtttctcttgtcccattcgattacgagctcctctcttaatgtgtgaaataatcaattactcctattatgaacgaaatgaattgaacatatcaatgtcaaagtagtatgtaaaaggatttcattgtttttttattattatttttttcgctttaatacgataaaaaagcgggaatcctcccgctttttacgattatcgacgtaagcctagtttgttaattaactcacggtaacgagttacgtctttattacgcagatacgtaagaagattacgacgtttacctaccattttaagaagaccgcgacgtgagtggtgatctttcttgtgagtacgcaaatgctcgttcaagttgttaattgagtctgttaggatagcgatctgaacttctggagaaccagtatcagattcgtgtgttttgaactcgctgatgagttgatttttacgctcttgagtaattgccatcctgtttcacctccatatcataattagccccagttacctagcaaccgtcggtgacttcggattgccaagcaatggttttaagactacgaaacatatgatactaaaaatcgcgcccatatgcaaatcttttagaataaaatttgtgtacttttgatgttttttccgttatttgctgaaaaaacggatcgcttcttgtttgtctttcccgatctgagccgtcagttcatcgatgccgttaaacttccgttcgcttcggattcgtttgtaccactcgattttaacgtcttctccgtatacatcctgttgaaaattaaacaaatgaacttcaattgacggctgatcgggacgcttttcataaaaggtcggtttgtagccgatgttgcagacgccttcatacacctcgccttttatttcggctttcactgcatacacgcctgtcggcggcacgatatagctgttgtgcaggccgacattcgcggtcggaaaaccgatggtgcggcctctcttgtctccgtgaatcacagtgccccggagaaaatacggctggccgagaagagtgtgcgcaagttcaacgtcaccatcctggagcgctgaccggatataagtggagctgatctttctgtcctgctcggtctgtttctcgacagtcgtgcatccggccttgccgtttaaatcgtccggcagcgtctccatcgtgccttttccgtattttccgtacgtaaaatcgaagcctcccacagcgtgccgcgcgttcaaccctaaaatatactcctcggcaaactgttttggagacagagacgcaaacgcttcatcaaactttacgacatacagcacatcagcgcctaaacgtccgatctggctgattttatcttcaagcggcgtaatcagatcctttggctctttgtccctgcccaacacatgggaagggtggggatgaaacgtcataacggccagcgacaggcctttttcttcggcaatttgtctggctgttccgattactttccggtgtcccaaatgaacgccgtcaaagtagccgagcgccatgacagacgccggctgctcttctttttgtaaatgatgcggatgagaaatatgtatcgtcttcacagaacggtcaccttttttcttattgttcgcttttttgcatgagcactttagccggtttcagcagtcctttttttgaaggatgcggcatataaatggccacacattctccgtcttcagtacagaccgctatacgggcgtcagctgtcattgcagaaaattccgccgggatgtcaaacactgacccgttttcagctttcttagctaatgtatcacttatgacccatttcggcaaatgattgagcgctctatcgatcggcacggcatgctctgcaaccgttccgtccgaaacctgctgttcaagttcctcaaacgtgaaacactcatcaaggctgaaatcgccggaagcagtgcggatgagatgcgacatatgcgcgggatagccgagtttttcaccgattgtcaccgccaacgttctgacgtaagtgccttttgagcacgtgactgtaaagcggaatgatgctgtgtcttcgttataagtgacaggggaagtgagcgcgatatcttcaatcgtgatattccgcttcggccgctccacttcaatacccgctctggcgtattcatagagctttttcccgttgacctttaccgcggaatacatcggcggcacttgctcctgcggtcccttcaattcgtctaaaacggctttgatatccgcttcttccagcggctccctgacaggctttacgctgaccgtttctcccgtctgatcttcggtcgatgtggagaaaccgagagtgatctcagcatcgtacgtttttgacttgtcggtgacgtactcaacgatctttgtagcccgtccgacacagatcggcagtacgcctgacacttccggatcaagggttcccgtatgcccgactttctttgtttttaacagttttcttattttcattacacagtcgtgagaagtcatgccgaccggtttatgtaaaaggagaactccgttaaccatctgtctttcgctcctttgttatcaattgtatcccgtaaaacgcagaaaagaggacagacgacactcgcccatcctctttcccgttattcagacggtttatctgaatgcagttcgtgaatcaatgtttcaatacgattgccgtactcaattgattcatcaaattcaaattcaagctcaggcgttttgcggagtctgattcggctgccgatttcggaacggataaatcctttcgctttctcaagccctttcagcgcctcttctttctttttctctccgccgagaacggagatatacaccttcgctatttgcaaatcacctgaaacacgtacgtctgttacagtgagaaatccgattctcgggtctttcagctttcggctgataatatccccgagctcttttttcatctgctcgccgacacggtttgctctcatactcaattcaatcacctctaagttaaaaccactctgttctagtgatcgtccgttctatctcgggaaaggagtcaataaacgcgagtacgcgctggatctccttttccgcctgaacgtgagaggaagagacgacagcgattccgaagctggtccgctgccaagtgtcctgatagccgatttctgcggccgacacgttgaacttattctgaaccctcgttataatccgcttcagaacggctcgtttctcctttaatgatcccgcatcataaatgatgcattcacattccgcaaatccgatcactttctttcgatttcctgcatgacatacgcttcaaggacgtcgccttcgcgaatgtcattgtatttcttaatcgttataccacattcatatccttgtgaaacttctttcacatcatctttgaagcgtttcagaacgtctacttccccttcgaagatgaccacgccgtcacggatcaggcggagtccgctgtcacgtgtaatgtggccgtctgttacatatccgccggcaatcgtgccgattttcgacactttgaatgtttggcgcacttcaacctgaccgatgactttttcttcgtattcaggatcaagcattcctttcatcgccgcttcaatttcttcgatgactttgtaaatgatacggtgaagacggatatctacattttcagcttcagccgtgctcttagcatttccgtctgggcgcacattaaacccgataacgattgcatttgaagctgatgcgagaatgatgtctgattccgtaatcgcaccgacgcctgtgtgaatgattttcacttttacgccttctacttcaattttttgaagagcggctgttaacgcttcggctgaaccttgaacgtcagcttttacgattaaattgatgtctttaacatcgccttgtttaatttgttcaaacagatcatcgaggctcagcttcgctttgtcgctgcgctgttcttccagttgcttggaagcgcgtgcttcaccgacagaacgggctgttttttcatctttaaagacgaggaattgatcgccagcctgcggtacgtcgtttaagcccgtgatttctacaggtgtggacggtccggctgttttcacgcggcggccgagatcattgaccatggcccgcacgcggccgaatgtatttccgacaacgatcggatctccgacatgcaatgttcccgtttgaacgagaagtgttgcgacagatcctcttcctttatcgagctcagcttcaataaccgttccttttgcctgacggttcggattggctttcagctcttccacttcactgacaagcagaatcatttcgacaagctcgtcaattcccttgcctgtaagagcagacagaggaacgaaaatcgtttctcctccccatgcttcaggaacgagtccgtattcagtcagctcctgcatgacacggtcagggttcgcgctttctttatccactttattcacggcaacgataatcggaacctcagccgctttcgcatggttgatggcttcgactgtttgcggcataacgccgtcatcagccgctacgactaaaatggtaatatcagttacttccgcaccgcgcgcacgcattgttgtgaacgccgcgtgtcccggagtatctaagaacgtgatttttttgccgttttcttcgatctggtacgccccgatatgctgggtgattccgccggcttcaccttcaacaacctttgtttttctgatgctgtcaaggagggtcgttttcccgtggtcaacgtggcccatgatcgtcacgacaggcggacggatttgaagatcttcttctttgtcagcctcttcatatttttcaagctcagtttcttcaagcacaatcacttcttctgtttccacaccgtattcagatgcgatcagttcgattgtgtctttgtcaagctcctggttaatggtagccattacacccagaagcatcagttttttaatgagttcagacggttctttgccaagttcttcggctaaggccccgactgttaaagagccggaaaacgtaattttctcaggaagctcttttttcggcttcagcggtttttgctgatactgatttttgttgttatgattgcgtttgtttttgtttttgttgttgttgttattcttcttgtttttgttaaattgattattctgcacgtcattcttctttccgtctcgaattttgtttggttgattcccagcaggctgctgattaatcccttgcggcttgtttttgttcgtttccgcaggcttctgagatgtaacgccggcgccgccttttttaaatttcgcatcaagctgcttaatggtcttttcttcaagcattgccatatggttatttactactatatccatgtttttcagcgcagtcaaaatttccttgcttgaaacattgatggcttttgcatattcgtaaactctcattttagccattcgttcacccccaaaaatattaatcgagcaagctgatcagcttattcgcaaaaccttggtcagtgacggcgacaacgacacgtgattccttgccgatagagcggccgagatccgcgcggctttcgacttttttataaggcactttataataattgcatttatcggatactttttttgcagtattcgcagatgcatcttctgtcagcagaacaagttttgcacgcgcatttctaatttcttttataaccaagtcctcgcccgacacgaccttacgagctcgattggccagacccagcaagggaaaccattccattccagacatgttattttttcaccttttccgccagttccagcaattcttcgaaaatctggtcatcgatttgtgattgaaattgattttgcaatgtgtttttctttttcgcagctaagatgcattctttctcaagggtgatataggcaccccgcccgttcttctttccggtcggatcgactgaaatctctccttctttagaacggacaattcggatcagttcctttttaggcttcatttcccccgttaccacgcatttgcgcagaggaattttttttcgcttattcacctaaagtcacctcttattcatccgattcggctgtttcaggctccataaagagcggctctaaatcgtcatcttcttcatgctctctcggatagatgccaaggtctcttgcatccgtttcacttttgatatcgattttccagcctgtcagtttcgcggctaagcgggcgttttgccctctttttccgattgccagagaaagctggtaatcaggaacgatgacagtcgtggctttttcttcttcgctgacgatgacatccagtactttagacgggctgagcgcattggcaacaaattcaaccggatcatcagaccagttgacgatatcaattttttcgcctttcagttcattgacgatcgcctgcacccgctggcctttaggaccgacgcatgaaccgaccggatcaacgtcagggtcatcagtgcggacggagattttagagcggtcgcccgcttctctggcaacggatttcagttcgaccgttccgtcataaatttccggcacttcgatttcaaaaagacgcttcaacagaccaggatgcgttcttgatacatagatctgcggcccttttgtcgttttttcgacttttgtgataaatactttaatccgatcgtgcggtttatagctctcattcggcatttgttcattgacgggcagcagcgcttcaatcttgccgagagacacgtaaataaacttgctgtctaagcgctgtacaattcccgtcatgatgtcttcttcacgatcgataaattctgagtaaatcacgccgcgctcagcttcacggacacgctgcgtcaccacttgtttcgccgtctgcgcagcaatgcggccgaagtctttcggcgttacttctatttcaacgacatctccgacaaggtagttcggatggatgtgctgggcgtcgtcaagcgagatttcaagtcttgaatcgtatacctcgtctacgacatcctttcttgcgaacacgcgaatcgtgcccgtctcacggttcagatcgacccgtacgttttgcgcctggttaaaatttcgcttatacgcggaaattaaggcagcttcaattgcttcgatgataatgtctttactgatgcctttttctttttcaagaatagtgagagcatctaatagttcactgctcatgttagcggtctccccccttaaacactaatacttcattcattaaaatgttacagctaatcttgcgttagctattttttcatacggaatattgacccgtttctttcttgttttgaccgtcatctctattgtaacagtttgtccatcaaattcagccaatttgccttcaaacacttttaaaccgtcaatcggttcgtacgttttcatgtacacatttttgcccagtgatttttcgaagtcggcttttttctttaatggacgctcggctccaggagaagatacttcaagaaagtagttctgagtgatcggatcggcctcatccagcttttcgcttaacgcttcgctgactttggcgcactcctcaatatcaacaccgttatcggaatcaataaacacgcgaaggaaccagttttgaccctctttgacaaattcaatgtctacgagttcaagctgaaggtcatccagtatgggctgagccattccttgaacggtatcagtcacttttttgctcatgtttttcctccttgtgctgtcgatatcatatcagccgttcctctgcataaaaaccctgcttcaaaagagcaggggcattgagaaaacgatggacatgtcgaggcaaaattgcctgttcaatacaaaagagcgggtttccccactctttgcctcggtaatcgttagcatttccaataaaactataccataaccatatatttaatgcaaatcaaactccgctcggaggctgtgcacaaagcttaaaacagagacagctgattttggtccggaagcgactcaagacagccgtgacggtctaaatactctaaaatggtttttgacacttttcctcgtttttgaagatcctcttttgaaaggaactccccttcttcccgtgctttcacaatattgagagcggcgttggttccgagtcccggaattgagttgaacggcgggatgagactgttgccgtcaatgataaattccgaagcgctcgaacggtatagatcgaccttctggaaggaatagccgcgctcacacatttcaagcgcaagctctaacacggtaaggaggtttttctccttcggcgaagcatcaagccctttagagctgatatcatccatcaccgctctgatggcggtcgagcctttaatcattgtatcaatgtcaaagtcatctgcgcggacggtaaaatacgcagcataatataaaagcgcgtgatgcactttaaaataggcaatccgcaccgccatcagcacgtatgcggcggcgtgggctttcgggaacatgtatttgatttttttgcatgaatcaatataccagttcggcacattgttctttttcatttcttcttcccattccggcgtcaggcctttgcctttacgcacgaattccatgattttaaaggccagtgaaggctcaaggccctgataaatcaagtaaaccataatgtcatcacggcagccgatcacttcgctcagttcacacgtattgttgtgtatcagttcctgcgcgttgccgagccatacgtccgtgccgtgggaaagcccggaaatctggacaagctcggagaacgtcgtcggcttcgtatcctcaagcatctgccgcacaaatcgcgtcccgaattcaggaataccgagcgtccccgttttacagccgatctgctcttcagtgacgccgagcgattctgtaccttggaaaatcttcataacttccggatcatctgtcggaatcgtcttcggatcaattccgcttaaatcctggagcatccggatgactgtcgggtcatcgtgccccaatatatcaagcttcagcaggttgtcatgaatggagtggaagtcaaaatgagtcgttttccattcagaccccgtcgcatctgccgggaattgtatcggggaaaaatcgtaaatatccatgtaatccgggacaacgataatccccccgggtgctggccggtcgttctcttaacgccggtgcagccctgcaccagacggtcgatctccgcgccgcgcatgtgtaggttgtgatcacccgcatagcctttcacatatccgtaagccgtcttttccgcaacggtgccgatcgttcccgcgcgatacacgttatcttcaccgaacagcactttcgtgtagttatgggcatggggctgatactcacctgagaagttcaagtcgatatcgggtactttgtcacctttaaagcctaagaacgtttcaaacgggatatcatgcccgtcctttttcaaaggtgtgccgcaagacgggcagcttttatccggaaggtcaaaaccggaaccgactgatccgtcattaaagaattccgaatatcggcagctcgggcacacatagtgcggagcgagcggattcacttcagtaatttccgttaaggtcgccacaagcgatgaaccgacggacccccgggagccgacgagataaccgtcatccagagaccgttttacaagcttatgggagatgagataaataacggcgaatccatgaccgatgatgctttttaattctttttctattctcgcttccacaatttcaggaagctcttcaccgtaaatgcttctggcgcgctgatagctcatttcacggatttcttcatcggctccgtcaattttcggcgtgtacagatcgtctttgatcggtttgatctcattgatcatcgaagcgactttctgcgtattgtcaaccacaatttctttcgctttttccgcaccgagaaaggagaaagcatccagcatttcatctgtcgttctgaagtgcactttaggcagttcgtgcctgtttaacgggttggcgccgccttgggaagatattaagatcttccggtaaattttgtcctcatcgtttaaatagtgaacatttccggtggcaacgaccggcttattcaatttttccccgagcttcgtgatgttggcgatgatttctttcagcgctttttcatcccggacgagctcaagctgcagaaggtgtctgtatacttccggcggctgcacttcaagataatcatagaatgatgcgatatcttcaacctcttcaggtgatttttgcatcatgccttcaaagacctctcccctgtcacaggcagagccgattaacagaccttctctgtatttattaagctgcgacctcggaatgcgcggcactctgtagaaatattgaatatgagaaatagacacgagcttaaacagatttttaaggccggtctcatttacggcaagcaatgtagcgtgataaggccttgatctttgataagcattggattgtcccatattctcattcagctgatcatgataaaaaatgtctttttcagcggcatctttgagcattttcaacagcaggtagcccgttgcttcagcgtcaaagaccgctcggtgatgctgggttaattcgatatcaaacttcttacataacgtatttaagcggtgatttttaaactcaggatacaggaaacgcgcgagttccagcgtatcaatgactggatttttcgctttttccgttttcagtagacgcttgtacgccacatttaaaaatcccatatcaaagctggcgttatgagccacaagcacgtcatcgccgatccattctttaaaatcccggacgacgtcaacgacatcgggagcgtcgcggaccatgtcatccgtaatcccggtaagctctatcgtcgttgctgacagcggatggtgcggattggcgaacgcttcgaatttatcgatgatttctccgcctcttattttgactgcggcaagctcaatgatggtgtcatacactgcggacagacctgtcgtttcaacgtcaaagacgacgtatgtgtcttcttccaaaagacggtgagctggattgtatgcgatcggaacaccgtcatccacgatattggcttccattccgtaaatcattttaatgccgtgttttttcgcggcggaataggcatccgggaaagactgcacaacggcatgatcagttaacgcaatcgcttcatgtccccattttttcgcctgttcgacaagctttccgatgcccgttacagcatccatttggctcatcggagaatgcagatgaagctcaacccgtttttcgccttcaggagcggtgtcttcacgggttttggcttttatttcattcacgtcatttgcaatcatgacgaggtctctgacgaatgtatcgttttgaatgcttccccgcgccttcacccacatgccttttttcagcgttttcatcaaagcggcgtcttctttttctctggcgaacatttttactaaaatactgtttgtatagtccgtgattttgaaaatgcagagcgtgcgtccgcttttcagctcgcgtgtttcagcatcaaacacaaacccctgcaccgtgattcttctttcttcatccatgatgctgtcaagcgtccggatttcttcgttctctttaatttgatagccgatgacaagcgggccggacggcgcttgatcctcatcgccctctttttccttcttctccatttcgataagcgcctgcatcgcccgctcctgatcttcagcaagcttttgctcgcggaatttctggacttcttggtcagatacgaaaatttcggtatccagctgcagttccggaaatccgaattggcgatagctgtgctgaatcagtgcgctgtatttatttttgagcgccgatgcttctgtatctgtttttgttttcacgatcagtttgtttcccttgagcttcggcttctgctgattcaaaagagccaccatcggcggcgaggttccttcaagctcttcaatacagcgtgtccaataatcctgtacaagctcctctgtcactgtaggatcgatgacctgaacagacgatgtgacacgggcgatgtgagcaaacgattgtgttaacctcatcatgaatgaatcgtatatttgatacggcaaaagagccttaaagcgaaattggaaatgccaggctttttctgctttatggattgtcagtttatcaatctctccgtcttcaaagtatgtcatgaaggtatcatctgtcatattaagctgctgcagaagaatctgaaactgtcttctgtttactgataactgttccattcagacagtatccctcccttaaaacatcataagtgaaggtacctccgcaggtgatgaggtaccttcttttttctctattttaacatgattttgtacgattcgttatggtgattacttcgtcttaataaattcagaaagctcatccactgaaacttcagcagattcaccggttttgcggattttcacttctacgatgccttcgtcggcacgttttccgacagtgatgcggatcggaaggccgatcagatcagaatcagcaaacttcacgcctgcgcgttcagcgcggtcatcgtataaaacctcataaccttccgtctggaattttccgtaaagctgttcagcaagctctttttgcgcttcatttttcatattcagcgccaaaatatgaagatcatacggagcaacgctcttcggccagatcaagcctttttcgtcgtgatgctgttcagcgatggcagaaagcgttctggacacgccgattccgtaacatcccatcagcatcggctgcgcacgcccgttttcatcaaggtatgtcgcattcatcgcttcagagtaacgcgtgccgagtttaaagacttgtccgacctcaatcccttcagcgaaacggatcgtgccttttccgtcaggtgacggatcgccttcctgaatgattcgaagatcggcatacgcttttacagacgcgtcacgttcgatgtttacgtttcggtaatgacggtctttttcattcgcgccgcaaacggcgtttaccattactttcacggcttggtcggcataaatctcaatgtcgccggcagcgccgatcggccccgcaaatcccggctccgtgccaagtttctccgctacttcttcatgagacgcaagctcaaccacttccgcgttcagaaggtttttcactttcacgtcgttgacctcatgatcgcctcttactaacacgagaacaaatcggtcatccgctttaaacagcattgatttgatgcaggcgctcggctcgatctgcaagaacgaagcgagctcttcaatgcttttgacatttggcgtatcaattttctccaatgcctcgggtgtttcatctgacggctcgctgttcatgacaactttcgccatttccgtattggctgcgtaagaggatccatcggaataagcgatggtatcttccctatttcagaaagagccataaattcatgcgtgtcttttccgcccatcgcgcctgagtcggcaataacgggacggacgtttaattcacagcgtgcgaaaatgctgctgtatgcgccgtacatgttttggtacgtttcctccagactttcttcagaagcatggaaagaatacgcatctttcatgatgaattcgcgtccgcgcaataacccgaaacgcgggcgtttttcatctctgaatttagactggatctggtaaagagtgagcggcagacgcttataagatttcacctcatcacgcacgagagaagtaatgacttcttcatgtgtcgcgcctaaagcaaattcacggccgtggcggtctttcagacgcattaattcaggcccgtacgtataccatctgcctgattcctgccatgtttcagcctgctgaagggccggcatcagcatttccaccgcgttgattttttccatttcttcacgcacgatcttctgaatgttttgaatgaccctgtaagccaggggcatgtagctgtaaaccccgctcgtattttgtctgataaatcccgctctcagcagaagcttatggctttttgcttcagcatcagccggcacttctctcagggtcggaataagcgtcaaactttgtctcatgtcttcgcacctctgattttttactagtcaattataagaataaacgctggatatcgttccatgtgacaaccagcataagaagcattaagaaagctacgccgataaatacgacaaatgcttccttgtcacggtttatcggcttgccgcggattgcttcaatgaataaaaacagcagccgtccgccgtcaagcgccggtatcggcagcaggttgacgattcccaggttgatgcttaaaaacgccgcaaactggaataggttgataataccggtttttgcaacttgatccgtcatatcataaatgccgacaggacccgaaagcatatcaagcttaaactggcctgtcacaagtttgctcagattggtcaggatcgcttttgtgacatcaacggtagatgtcgcgccgtaagcaatcgctgcaagcgctcctttttcagtcggcgcataagagccgaagcggccgattgtttttttattttcatcttttacagcttcaggtgtaaccgagatatgaaacgatttgccgtcccgtttgacggcgacatcgatttttttcccgggattttcttttaccgctgtcacgatgtcggtccatgacctcattttttcaccgttaatgctctggatatagtcgccttcttttaaaccggcagcagctgcgcgtccattgtctgtcagcttcccgagctcaggctgatttgaaggcacgccttgaatgaatccgagcatgacgagaatgacatacgctaagatgaagttcattatcggaccggcagcaatcgccttaatccgcttccatacgggtttagacccgaattgtcgattgtaaggcgcaatctgcacttcttctccgtctacgataaaaaaagaggtctgactgacagtaaagcccgccagttcatcttctttcccctgctcgtacccggtaatcttcatttcgtgctcaagatcagccgtctccacctcgataattaaagcgtcgggatatttttccttttgattaatgatgactttttccacttcgtcatctttattaaaaagaagcccgacggtataaccgggtttgacttcgatcatctccgggtcttcaccggccatgcggacgaaccctccgaccggaaggagtctgatcgtatacacggtttcattctttttaaatgaaaagattttagggccgaagccgatcgcaaattcacggcaaaggattcccgctctttgggcgagcaataaatgcccgagctcatggaaaaaaacgagcgttccgaaaataataataaacgcgataactgtattcacgaacataccaccttatgtgagtattgaattaacgtatccccgggtgtctttgtccacttcttggatatccgcaagactcggatcctgaattacgctgtggcggtccaatgctttttcaatcaggtcctcaatcgataagaatgaaatccgtccggcaagaaaagcggcaacggcttcttcgttggccgcatttaaaaccgtcggcatcgttccccctattttacctgattcaaaggcaaattgtaagcagcggaacctttcaaagtcagctttcgcaaaatgaaggcttccgatctcccataattcaagcctttttgtttcaggcagaggcagccggtccggatatgtcagcgcgtattgaatcggcaccctcatgtccggatttccgagctgggcgatgacgcttctgtcgtgaaattcaaccatcgaatgaatgatgctctctttatgtaatacaacgtcaatctgttcatacggaatgtcaaacagccaatgcgcttcaatgacttcaagccctttattcatcattgtagccgagtcaatcgtaatctttgcacccatcgaccagttcgggtgattaagggcgtcggcaatcgttacagactcaagctcctgccgcgttttatccctgaaactgccgccggatgccgtaatgatcaggcgctcgatatttttgctctgttcgccttgcagcgcctgaaaaatagcggaatgttcgctgtcaaccggaagaagaggaacaccgtatcgttttgcgtgtcctttcactatatgcccggcagtgacgagagtttccttatttgcaagcgcaattgtttttttctgttcaatcgctttcaaagtcgggattaaaccgacgcttccaagcagcgcattgaccacgatatccacttcgtccatgactgccgcttcaatcaggccttcttctccgatgccgatttgacattcatgcgaaaaagacgcttctttcactttttgatatgtatccatgtcgccgactgctacatatttcggctgaaacgttctgatcaacgggatcgctttctcggcgtttttaccgaaagtcatcgagacgagacggaactgatcttgatgcatgcgcaatacgtctaacgtctgctccccgattgatcctgttgctcctaaaagacaaatattcttcaaaatgccactcccattctatgcgtccagatcggtcttattttcatattagcctttctcatgaaaaaagcgcaagcagaaagtataagaacggcatgacaaacaaaaagctgtcaaatcggtctaaaatgccgccgtgcccgggaaggattttccccgaatccttcacatcatagtgccgcttaagcgctgattcaaccaaatccccgatctgtccgaacacagacagaacaagcgtgatgaccaaaagaaccggatatgaaatcggaaggtgagcaaacagctgaaaaacggccgtaaaaataagggcgatgacaataccgccgagaaacccttccactgttttgttgggactgatttcgggccacagcttccgcttcccgagcgactttccgacgaaatatgcgcctgagtccgttgaccatatgacaacgcaggcataaaagatatacaaaagcccgtttgtttcaatgtttctgatttcaataaaataatgaaaacacagtccgatatataccgtcgcgagaacgataaacccgacttcgtcaaacgtaaaggtgtttttcacgagcaccgtatagctgagcagaatcaatacggcgaaaatcgttacttccattttcgcatcgaaaaaatgatatttgtccggcatcatatacagccataacaacaagaagctgatcagacccggaaaagaaaaaaatctgagctttttcatccgcaaaagctcaaaaagcgctatacttcccatcacgtaaacaaatacggtgaacggcaatcctccgaaaataaccaaaaataaaaatagtgccgctgccagaacacctgttaacagtctttgtttcatttccaccatcctctaaattccgccaaacctccggccccgctgctgaaattctcccactgcctgcagaaagtgatcttctttaaaatcgggccacaggacatctgtaaaaacaaattcactgtaagccacctgccaaagcataaagttgctcagtctgatttctccgctcgttctgatgagcagttccgggtcctggattgattctgtcattaaatgcccggaaaagagcgcttcatcaatgtcttcgatattcagcgtgccgcttttcacctgttcggccaatgcttttgccgcattgacgatttccgtgcgtccgccgtagttcaaagcgaaattgagaatcagcccgtcattttgttctgtatcttttacggccttctcaatcgccctgtacgtatgagaagggagcgcggattcatctccgataattttcacctgtacattttcctctatcaattcaggaagatacgtattcaggaactcttccggaagcttcatcaaaaagtcgacttccatcttcggtcgcttccaattctccgttgaaaacgcataaagagtcagaactttaacgccgagctgatttgcgagctttgtcaccctttttaccactttcattccttcatgatgtccggcaatccgcgggagtgagcgcttcttcgcccagcgtccgtttccgtccataataatggcaatgtgtgcgggaatttcacccttcagtatgtcttcttttgtataccgttctaagttggaagccgcattctgctgattcttccaatttttgagtatgttgagcatgagattcctccgtcacccaaaaaggttgcgttgctgatgatcaatgtaatcaacagtattaacaaaaaaaccccctgtaaacatgagagggtcttttcacattatctattgtacatagtttttcattaaacttccatgatttctttttctttgtctttcgtgacgctgtcaatttttgacacatattcatctgtcagcttttgaacgtcttcactggaagcacgaagctcgtcttctgtaatgtccccgtttttctcaagttttttgaggtcgtcgttgctgtcacggcggacattacggactgctactttcgcttcttccgcgtattttttcacgactttgacaagttctttacgtctttcttccgtcagagccgggatcgcgatgcgaataattgtgccgtcacttgtcggagttacgccaaggtcagctttcaggatcgctttttcaatatcgccgattgccgttttgtcatacggtgtgacaacaagcatacgcgcttcaggcacattgatggaagacagctggtttaaaggtgtttgggcaccgtagtattctactgtcactttatccaatagagatgggttggcacgtcccgcgcggactgacgccaattcacgtgaataagcggcaaccgctttttccatgcgttcttttgtttgtgttaatacttcgtttgacaacgttatttcccccttacgatcgttccgattgattcgccgattacggcacgcttaatatttccttcttccataatagaaaagacgatcagcggaatatcattatccatacatagtgaagaagccgtagaatccatgacttccagcccgtcttttaacacatcgagataagataatttttcgtatttaacagctgactcatcttttctcggatcggcattatacacaccgtcgacattatttttcgccattaaaatcacatccgcttcgatttcagcggcacgcagcgctgcggttgtgtccgtagagaaataagggtttcccgttcccgcggcaaaaatcacaacgcgttttttctccaggtggcggatggcttttcttctgatataaggctcagcgacctgacgcatttcaattgatgtctgcactctggactgaattccgagcgtttccaggctgtcctgcagggcaagtgagttcatgacagtagcaagcatgcccatataatcggccgtcgcacggtccattcctaagtcactgcctgtttttccgcgccataagttgccgccgcctacaactacggccacttcgacgtcaagctcagcgatttcttttacctgtttagcgatggattggataacagtcggattaatgccgtttccctgctctcctgccaatgcttctccgctaagctttaaaacgatacgattgtattttggtttttccataataacctccaagtgtaaacattgccgtttcctattatgcaagagaaaaaaaggtttgtaaatatagttttaaaaatagggaacacaagtagtgtcccctatactgcctgaaaagccgcgaaagattcgccaaggctttccgccattattttttcacttggttcataacttcttcagcaaagttttcttggcgtttttcaatgccttctccaacttcgtagcggacgtaagttttaacagatgcgtttttcgcagccacaacttgtttcactttttcgtctgggtttttaacgaaagcttggtctaataagcaaatttcttcgaagaatttgttcagacggccttcaaccattttagctacgatgttttccggtttgccttcttgaagagcttgctgagtcaggatctgacgctcatggtttgcttcttcttcagacacttggtcgcgggaaatataacgaggatttaccgctgcaacatgcatcgcgatgtcttttgcaagatcttcgtcagttgttccgctaagaacggataatacgccgatgcggcctcccatgtgaaggtaagcaccgaacgcttcgctgtcttcttttgtaagaacagcaaaacggcgaagagtgattttctctccgattttagcaacattgcttgtgatgtattcttcaacagtagaaccgttttccatcttttgacccaacgcttcttcaagatcagcaggagcgtttgcaagaaggtggtcagcaagcgtgttcagaagctctttgaagccttcgtttttcgcaacgaaatcagtttcagagtttacttctaagataacgcctttgttgccgtcagttttaataagagtagaaccttcagcagcgatacggtcagcttttttagccgctttcgcaattcctttttctctcagaaggtcgattgctttgtccatatctccgtcagtttcagtcaatgcttttttacagtccatcataccagcgcctgttttttgacgcagttcttttacctgctgtgcagtaatagccatttgaattcctccttatatgtgtaaacaagatatgtatagatacatttttcttgaaaaaaggtgataaaaggcagtccctcttatcaccttttgattaggttacgcagttgtcgtttctgtttcaggtgcagtctcttcagcagcttccgcttcttcttcgccttgcttcgcttcaagaatggcatctgccattttagaagtaagaagtttgacagcgcggattgcgtcatcgtttgcagggattacgacatcaatttcatcaggatcacagtttgtatctacgattccgatgataggaatgttcaatttgcgagcttccgcaacagcgatgcgctctttgcgaggatcgatgatgaataatgcatcaggaagatccttcatgtctttaattccgccgaggaatttttcaagacgctctaattcttttttcaattgaacaacttcttttttcggaagtacttcaaatgtaccgttttcttgcattttctcgatgtctttcagacgcttaatgcgtttttggattgtttcgaagtttgtcagtgtaccgcccaaccagcgttggttgacatagtacatgccagagcgtacagcttcttctttaacagaatcctgagcttgtttttttgtgccgacgaaaaggatttttccgccttcagcagcaaggtttttcgtgaagttgtaagcttcctctacttttttcactgttttttgaaggtcaatgatgtagattccgttacgctccgtgaaaatgtaacgcttcatttttgggttccagcggcgtgtttggtggccgaagtgaacaccagcttcaagcaattgtttcatagaaataactgacatgtgatttcctcctaataaaatggtttttttcctccgcttaggtcatttttgtgcagaactgccgtttgcagcaccctctgcataaatcgttaagcgtgtgtatttaacaccaagacataatataacacagctttatgcgacaatcaagaatcctttacagctttgccgcgaaattttaaaaacagctcgatttctgtctttccgctctgcacccgtttggcgatttccgcaggggtgagcccttgttcatataattctgaaacacgttcttcaaacgaatgcgcaccgttgttttcgtcactttcagcccgttccgttgcactgatgagcttttccatgtgatccggaatatcaggctcttttttcggttccggccggggttcggcgtcttctgcgtcaggcgcttgatcattccggctttttgtgtcttcgagtctttcattttcttctttcagctcaagcagaaacgctgcaagggtgttttccgtctcttcaagaatcttcttctgctggcgctccgtctccttgagggctgaaaacctcgtgtacagaataatgacggcataaagcagtacgccgtgaagcacaaagcttaaaagccataatagtgttgacatgtttttcactcgctaaccatgagttcattattgaattactttttcaagcaggtgctttaatttaaacagcgcctttgaatgaatctgtgaaatccgcgacgtcgaaaggttcaggacttgtccgatttcggtcaaagtcagttcttctttatagaataaactgacgacaagctgctctttttcagagagctcgtgaattttgcccgcaagctgagcgatcagctcgtccttcatgattttttcttccggcggcacatttttgtcatctctgatcatcacttgaatattctcaccgtcatcctggtcgtgaagcttttcatcaattgataagagattggcaaaaaacccttcattcatcgttgatactacgtcctgctccgtcatcccaagctcttctgcgatctctgaaggcgtcacattccgaaggtagcgctgttcaagtttttcgattgccgcttcgactttttttgtcttctcccgtgaagttctgggcagccaatcttctttacgcagcccgtcgatgattgcaccgcgaattctaaacgaggcataggtatcaaattttaaatcccggccggggtcaaatttttctagggcatcatataaaccaagcataccaaggctcattagatcgtctttatgcaccgatttcggcagtccgacggaaattctgccgacatgatatgtgaccaaaggcatgtaacggcgcattaaatcatcaccggctttaggatctttccactctttccagcgcgaccaaagcacctgatcttcataattcaaggattgcattgttatccccctacctcatacctttattaaatcgttgtttcaccttgtttaacagttcgaatgtgcagcatgcaggactttggctcaaattcaatcgtccggccgcttgagccgcccgtatcttcactgatgaccggaatgttatacaatgaaagctgctctttgatagccgctacattcctcggaccgattttcatcaggtcgtttgtcattttaaacttaaacatctccgctcccccggcgagttttgccttcagggcaaacttgcggcagccggctttcaaaagcatatcaattgtcatcttaacggcggtgtccgcgtattttgcacggttgagctccgccgtttttgataaaccggagtccggcagcatgacgtgaacgagtcctgccgtttgtttgtctttatcgtataaaaccagccccacgcatgaaccgagtcccgaagtccggattttatccggataacgcgcgacttgaacatccgcaatccccactttaacgactgcggcttccgcacggctcataaagccgcacccaatgagacgaagagcttttcaaaagaatcatagtccgggagcataaacatatgggctttgagctcctgccggctgccctggtcaaaaatagaagtatccacgacaatggcatgctctccgacttggctgagctccatcagtccttcactgataaccgcgccgaacatatcaagtgagatttccggcacgctcgggtaaatctcaagctttgtcaaatcagccaatgccgttaaataggaacctgctaaaatattgccgaactcatgtaaagcagaagaactcaaatgatcttcgcccaactggtcaatatcaaaatccggatttccgatcagctctctgataaactgttccgcctgatggaaaggcatgatgagaaagatagagcctgtcatgtcgccttccattcttaaaaagatactggcgaccggcgtttcagccccgccgaaaaaatcagcgagctcatcaaatgtcaataaagtcgcaaacggcacttccatgtctatctttctgttcagcagctgagccatggcagaagccgagtgacccgccccgatatttccgacttcccgcaaaatatccatctgctcttctttgatcgcttcaaacttactcatgttgtcttttcccctttaagcattcggctctccggacgcagatgccgaagcacctttatccagcaccgcatgcgcatcaataatattgaggagcctgttatcttgcttgacgatctgtttaatccacacatccgtttcctttgtctggctttcaggcgcggattcgatttcattttcatgcacggtgatgacgtcattggcctcatccacgacccatccgacatcggcgtcacggtaagaaatgatgataatccgtgtctcttctgtgatgtcctgttcaggctggttcagacgttttcttaaatcaagaaccggggtaattactccgcgcagattgataacgccgcggatatacgattccacacccgggaccctcgtcggtttttgccacttttcaattgatttcacctgggaaactgagatagcgtattctttcccgtttatcataaacacaatcattttttcacctgttttgatttcagcagtcatgcgggcacctcctcgtgtcgttttagtagatcagcgcattgcaatcaataatcagcgccacttctccgtttccgagaatcgtagcgccggaaatcgcaaagacgttcgtcaaatagtcgccgagtgatttcagtacgacttcctgctgtccgataaaagagtccacgacaaaagcagtggatttatcgccctttttcacgacgattacatggaactgatcggcatcctgttttgaatctgtaatgccgaattcttttttgagatagacgatcggaacgatttgtcctctgaaatcaatcacttctctgtcatgcgtctgcaggatatctttcttatcaataacagccgtctctataatagaagaaatcggtatcgcaaacgtctcttcttccagtttaatgagaagaacggatataattgaaagtgtcagcggaagctggatactgaaaagagaaccttggccttccgcggatttgacactgacagagccgccgagtgattcgagtttattttttacgacatccagaccgacgccccgacctgaaatgtcagaaatttgatcggcagtcgagaagccaggagcaaaaataagctcgtaaatctcattatcttcaagcgtttcagcatcacgttcggtaattacactccgctcgagcgctttttcaagaattttctttctgttcaggccggccccgtcatcttcaacttcaataaagacatgattgccgctgtgatatgccttaagcacgacatgacccgattccggttttcctttattcacccgcacttcaggcgattcaatgccgtgatcgatgctgtttctgattaaatggacaagcggatcgccgatttcatcaatcaccgtgcggtccagctccgtttcagctccgatgatggacaattcgattttcttgtttaattccttttgaagctggcggatcattctcgggaaacggttaaagacggtttctaccggcaccatccgcatattaagaataatagactgaaggtcgcccgaaattctggtcaggcgttcaacggtttcagtcagctcattgtggtcaagctctttggcgatctgctcaagacgtccgcggtcaatgacaagttcttcaaaaaggttcattgaagaatccagtctttcaatgttgacgcgaatcgttttcgagccgctgtgatgcttcggctgctcttccgttttcgcttgcggtttcggctgtttttcagcctttttaaccggagtttccttcaccggttcagctgcttgcggtttttcggccgtttttaacggcgcaccggcagaaatttcgacattctccacttctgaaatgccgctgatgagttctttaatttcttcagcaggctgctttgtcaagaaacacacctgaaaatccgttccgaaatcttccgtctcaagcacttccgcggcgggtatcgtttttgcaacttccccggcttcattcagcttttcaaatatcatgtacacgcgcacggctttgagcatgcagctttcattcagggaaaccgttatttcatagcggctgaatccttgctcttccgcctcttcaataacagtccgttcgaactcatcataattccattcagttgaagtctgttgttttgaagccggcggttctgctgtttcggctgaagccgcagtctcatgcgccgcatttacgtcgagcttcgcacttacttcagaaatatcacgtttgccgtctcctccgtcaataatggactgcaccatctcttcaagatgatcaagcgcttcaaacagcacgtccagccaatccgatgtaacgggcatttctccgttgcggatggcgtccagcacattttccatcaggtgggttaaatgcgccagatctgtatatcccatcgttgcgctcatgcctttcagcgtatgggcagctctgaagatgtcatgcacaagctgaaggtctgccggatctttttccaacagcagcagcttttcgttacatgtctgtaagtgctctttactttcatcaataaagacatctaaatattgattcatatccaattgattcacaccctctcttttttcacacatccggtgatggatgccgcgatatcttccacatgtttaatctcatgaatgaggcccgcctttatcgctgacttcggcattccaaacacaacacaggattcgtccgattccgcaatcgttttaacgccgcctgttctgagcatttcttttacgccctcggttccgtcgctgcccatgcctgtcataatgacggctaccttttcgtaaccggataaacggcttgccgaccgaaacaaataatcggctgacggtttatgccggctttccgtatcatgaacatcaagaatgatgcggagccttccgccttcctctgcaaccgtcatattttttccgccgggcgcgatgtacacccatccgtctttcgcttcttcaccgttttccgcttctttgacctgaatatctgacaaatggttgagtctgtctgcaagtgaagcggtgaagccttcaggcatgtgctgaacgacaaatacaggcgcctttaaatccttcggcagtttcggaaccaccttttgcagagcccgcggtccgcctgtagaggtcgcgatgaatacggcctgcttggcggattttgctttcggtctttcaaatcccgccaaagccggacgttccgggatagaagactctttcactgccgcctcaggtttttgtgcgcgggacatcccggctgcaatcaccctctcaatcagctgctctttaattttataaagatcaagtgaaatcgctccggaaggcttagtgataaaatcaaaagcgcccatttccaggcagttgatcgttcggtccttcccttgctgtgtctggctcgataccatgatgacgggaagtttatatatgctgatgatcttccgcaatgtatccgttccgttcatgaccggcatttcaatatcaagcgtgacaacatccggtttgagaagctctattttcttcagcgcctcttccccgtttctggctgtcccgatgacttctatctgcacttccgcagccagaaaatcggtaatcatctttctcataaaagctgagtcatcaacgacaagcacacgaatcactgtaaagtcctcctcaataaaaaagaagataatctctcaataaatgccggtttctcttctcttggtttgttttcttccgtttgaaacaagacatccgtcagaagacggacggacctgctggcttttgcttgaggactttttattaaaaaaggcacctggtcaatgacggcttgacttactagcggatcatcgggtatggagccggcgaaacgcacctccgcgcctaaaaacgtgtggatcgcatgagaaaggcggttgtacgtgtccagcgcctgtttttgagcgcgggcgcgattgacggcaatgtttacggtcagccgttcatccgcgagcaaaagatgtttgatcgcgctgtacgcatccataatggccgtcggctcaggcgttgtcacggcgagaatgtcttccgccgataaaataaacggcagctgttcttttgaaagtcccgctcccatatcaaacagaacgtaatcaaaatcgcttaatacagcggaaagaccattcataaaagccgaccacttctctctgtctgcttgatagaacgcctcaagccccgttcctccggatatgtagcgaaggcctttcggaccggaggaaagtgattgagccaacgcgtgccgattctccatcacatcaataatggtgcgggaagaagcagctccgatcagcacatcaatgttgcccattccgatgtcaagatcaatgatgagtgctttttttcctttttcctgcagggcaactgccatgtttaatgttaaattagattttccgacgccgcctttaccgcttatgacggctaatgtcctcgcttttttctcataaagctccggcttgatcatttgcctctctctcattttccttcttaatgactctgcctgatcgggtttcatgccaaaagcatccttacaaactcttttggtgaagccgataggatgtcttcaggcacatcctgtccatttgtcaaataggcggcgccgattcttgattccgacagcacttgaaacacggagccgagtgaggcggtttcatccgttttcgtgaaaatgaattgattgaccggcacaccggaaaactgtttcagcacctgtttcatatcttcatattttgcagatgccgataatacgagaaaggattgtaagcctgattcaaacggaatcatctcttgtaattccgtaatatactgctcttctttaaagtttctgccggctgtatcaatgaaaacatggtcgtattcagcgaatttttccagtgccttcagacattcttcctttgaatagcatacttcaagaggagcctgaagcagctccgcatatgtcttcagctgctcgaccgcggcaatccggtaagtatccgtcgtcataaaggcaatttttttatgctctgtcagcattgatgaggccgcaagtttcgcaagtgtagtcgttttgccggccccggttgaaccgaaaagcacgacgtattttgattgaatcccttcctgccacctgtctgtcgaagggagttttttcactaacaaatcctgcagctttgagctgacattatcttcagttaaatctccggaaacaattgaagaactgagcaattcactgagtacagcgttttgcgtatgatcaggaagcccggcttgcttcaatagtctctcggctttttttaatggttcagggagcacttctttcaaatgcgccagttcgccggaaatactttgatccggaaggcgcggcggctgaacaggctcagctttctccgccgtttccgtctttttcatttcttcagcggcagccggcggcgtttttctcgcttccctgacgtcacgatctaaaaccgctatcacttcgacggcctgctgcgaccgcagccccagccattttcgtttctttacttgtttggaatgtaaaataacggcatcattgccgagttcctttttgatttgcttcgcggcatcctgcattgaagcggctgtaaatttttttattttcattaaatatccaccactccaatgctctgtacttcaacatttgcttccagctcattataagaaagaaccggaagatcagggaaataccgttctaacagctgttttacatacattctgacagcaggcgagcaaagaagaatcgccgactcctgacggatggaaagctgctcggcctctttagcgacagaacggatgatgctgtccgaaacctcagggtcgagtgacaggtaattgccctgttcagtctgctgaaccccgtctgcaatcgctttttccacccggcctgagcatgtgatgaccttcagcgtttcatgctctctcgcatattgtgccgtgatttgtttggcaagcgactgtctcgcgtattctgtcaaaaggtctgaatctgtcgttaatcttccgtaatcggcaagagtttcaaaaatggtcaccaagtttctgattgaaactttttctctcagcaatttggcaagcaccttttgaatatcgccgacagaaagagggttcggcgtgacttcctcgacaagcacaggataattttccttcagatgatcgatcagctgctttgtttcctgtctgccgaccagttcatgagcatgctgcttaattttttctgtaatatgcgtagatacgactgacgccggatcaacaactgtataccccagcatgtccgcttcatcttttgcagcttcgctgatccattttgcgggaagtccgaacgacggttcaatcgtttcaattccttcaatgacgtcatcttcaggcgtcggtgacatcgctaaataatgatccagcaggagctctcctttagcgacttcattgcctttaattttcaatctgtattcattcggctggagtgcgatgttatccctgatgcgcacaaccggaatgacaagtcccaattcaagcgcaagctgacgtctgatcatgacgatgcggtcaagaagatcaccgccctgccccgcgtctgcaagcggcacgagtccgtatccgaactcaaattcaatcggatcaatatgtaaaagctgcacaacgctttccgggcttttcagttcatccgcctgagcctcttcttcaagaatttcttcctcttcttcgctcggcttatccgctttggacagcatataagcgccgaatgcaagcagaccggcgatcggccccgtcagcagaatgccgatcggtgtaagaagaccgagcaaaagtacagttcccgcggctacatacaagagcttcggataagcaaacagctggcctgtaatatcatgaccgaggtttccttcagatgccgctctcgtcacgacaatccccgtagccgttgaaatgagcaaggccggcatttgagaaacgataccgtcaccgaccgtcagcattgtaaagtgagacgcagcttcttgtatgctcatcccctgctgcagcatgccgattacgattccgaaaataatattgatcatcacgatgatgatccccgcgatggcatcccctttaacgaatttgctcgcaccgtccatggcgccgtaaaaatccgcttcccgggcgactttttcacgtctgtgctttgcatcctgctccgtaatcatgccggcatttaaatccgcgtctatactcatttgctttccgggcatcgcatcgagcgtaaatctcgccgccacttccgatacccgctcggcgccttttgtaatgacgataaactgaataataattaagataatgaagacaacaagccctaccagcacatttccgccgacaacgaaattcccgaatgtctcaacaacctttcccccttctccgtgagaaagaatcgaacgtgtcgtcgacacattgagcgcaagccgaaacagcgtcaataacagcagcaatgacgggaatatcgagaattgcagcggttcttgcatattcattgtggtgagaagcacgatcaacgcaagagagatattaatgatgatcaaaatacttaacaaccatggagggaatggaatcaccagcattgccacaatgaggacaacacttattaaaaccgataaatctcttgttgacatgctgtttttctctccttttgaatctgaaattcgctatactttttgtttcgttttatatacataagccaaaatttccgcaatgactttgaaaaactcttccggcacagcctggtcaatgtcaacctgatcatataacgcacgcgcgagcggcctgttttcaatcgtcatgacatcgtgttctttggcgatctgcctgatttttaatgcaagatggtcgacccctttggcaacaatgtaaggggcggccattttcttttcatcatattttaaagcaatcgcataatgggtcgggttggtaatgatgacatccgctttcggcacttcctgcatcatccgcctcatcgccatttcccgctgcttctgcttaattttggacttgataatcggatcaccctccgattttttgtattcatcttttatatcctgctttgacattctgatatttttctcatagtcaaaacgctgatataaataatcaagcccggccagcagcattagagcccctgatcccgcaagccccatccaaagcgtgagcttagaaacgaaagtgagcacttccgcaggtgttaaaagcggaaggcggagaatatcgccataatgcagccagagcaccataaaggcggcaaaaccgaccacagtaatcttcaaaatggatttgaccagttcaacaatcgccctcatgctgtaaatccgcttaaatcctttcagcgggctgagcttattcaagtcaggcttgagaacttccgcagaaaacagaaaacccacctgcatgtaattgctcacgacacctgccacaagcgcgaccagcataatcggcgcgaggatgaggctgatatctttcaccgtatctacgaacagttcatgcacggaagatgctgacagatgtaatgatatcgatttcgtataaaacgttttaataaaggacagcagcctgtcccgcatataaggaccgagcgcgatcagcgaaagaaagataatcagtaaagaaacggctgtattcacatccgtacttttcgcgacctgtcctttctttcttgtatccttccgttttttcggagtggctttctccgttttttcaccggcaaagaattgcagattcagtctgagtctcatcatgtcacaccgaccaatgccaatagattccgcatggtttcaacggtaaggctgaagatgttgcggacgacgacaaacatcaccgccatacaaacgatcagcataataaagctcacggctattttcagaggaagcccgacaacgaaaacattcagctgcggcaccgttctcgccacaataccgagcgccaaatcaactaaaaacagactggccacaaccggcgcagacatttgaaaagcgataatgaacatggcattgaagctttttgcgataaaaagtccaaagtgatcatttccaaacgacggaaatgcctgatcaagcgggatatactgaaagctgtaataaatcccgtccaataaaagataatgggcgtttacgctgagcataaataacagcgccagcgtataaacgaattgtccgatcagcgggctttgcgttcctgattgcggatcaatgacattggcgatggaaaagcccatctgaaaatcaataaaggaacccgctatctgaatggctgtcatcatcatgaaagcaatcagcccgaggctcaagcccacaacggcctcttttatgacaagcagcatatactgttcccctatttctatttccggcgcatgtttcagcgtgctgaagcagatcaccgaaagaaaaaaagcaaagccgattcggtgaaccgccggcagattccgatgtccgaacaccggcaccgttacaaaaaaagcagagattctgataaagaccaataaaaaagcgggaaataaatcaatgatggaattcatttgattctaccctgcaaatcggttcagatgagagaacagatcagttgtgaacgaaagaatcgtcgacagcatccaaggaccgaaaaagatcagtccaagcatcaccgccacgattttcggaatgaacgcaagcgtctgttcctggatttgagttgtcgcttgaaagatactgacgagcaaaccgacgatcagcgcgatggcaagcagcggcccgctgatcattagtgttacatatacggctttttccgccatggaaattacaaattctgaactcacaattagcacctaccctaaaagctgtcaagcaaagatttcacgattaaataccatccatcgaccaaaacgaaaagcaatattttaaagggcagagagatcataaccggcggtagcatcatcattcccattgacattaagacgctcgccacgaccatatcgataattaaaaacggaataaaaatcataaagcccatttgaaaagcggttttgagttctgatatcgcataagcaggcaccatcgtcgtcaaaggaatatcctgaatcgattcaggttttttcattttggcatagttcataaacagcgccagatccttctgccttgtatgcttgctcatatactctttaatcggcttctcggcttttgtatatgcttcatcgagactgattttgttgtccatcagcggcgttaaggcttccttattaatctctgaaaaagtcggcgccataataaaaaacgtcaagaacagcgcaaggccgattaaaacctggttcggaggcatgttctgcgtcgccagtgaggttctcacaaaagacagaacgatgacgattctcgtaaagcaggtcatcaaaatcagaatccccggcgctactgaaaagacagtcaaaagcagcagtaatttaacagtggagctgacttcggtcggattgcttgaattaaaaagattaacgaattcattcatgatgataagggcctttcttctttccttcagaacggctttgtttcagctcgttcagctgttctttcagcgcttttgaaaacgacggaagcatcgtttgcggctttttttctccatccttacgcggatttacgagcttggtccattccacttttgaagacatcgactcttcgtattggctcagaatcgcctcgcgctctttttcatcttctatttcttttaaaagctgtatcgtttcgcccacaccgactacgagaacgctgtttcccactttaatcagctgcacggaacgattttggccgactgacgttccgccgatattttctacatattgaaacggcttcagcagacggtttcttctattcatcagtttgacaaatccatagatcagcagaatgacgaataataacgccccgatcatctttacaaaatcaaaagcggagacagaagatgcagaagcatcccctatctcttgatcagccgtttgtttcgatgtatcgctttttttctctgttttgtttgttgattgtttgtcaaaccattcgttgacggtggaattatcagactctgccgcaaaagcagggaacggatgtacattgagtaaaacgaaataacaaatcaaagctagtaaaccatgactctttttcaacagtcgtacaccctttagcttaatgttttattaatggcttcaagcacgcggtccgcttggaacggtttcacgataaagtcttttgcgccggcctgaatcgcgtcaataaccattgactgctggcccatagccgaacacatgatgattttcgcctgcggatcgatctgtttaatttcctttagagctgtaatcccgtccatttcaggcattgtaatatccattgtcactaggtcgggggaatgctctttgaatttttcgactgcctgcgctccgtctgaagcttcagctacaacgtcaaaaccgttcttcactaaaatatccttgatcatcattctcataaatgctgcatcgtctacaattaaaattctgtgtgccataatctgtttctctcctctatgttcgcttattttaaattgttaaggcggtctgcctgacttaaaatatcagtgactctcacgccgaagttttcttctatgacaacgacctcgccctttgccacgatccgctggttgaccaggatgtccacaggttcaccagccagcttgtcaagctcaataatgcttcccgcagaaagttcaaggatttctttgacgcttctcttcgttctgccgagctcaaccgtaacggaaagcggaatatccatcagcatatcaaggttattccttgatccttgcgccgcttcgttatgatcaaacgcctggaattctaccggagcgacttgaacaggagcagctttttttgcggttccctgtctcttcggaagctcgggttttgcctgcggctccggctgcatggcaggttccggctgcggcgtttcgtatgtttcctgtggttctgatgcggtttctgcggcctctgactcatgctggtccgcagtcatcaggtctgcgatcagatctttcgcaaacgtaatcggataaagctgcatgatgctcgaatcgattaattcgccgactttcagacggaatgacacttttacgagcaggtcatcctcaggtattctgtcggtccctttttcttccgtcacatccagaagttcaacccttggcggagaaatgtcaatctttttactgaatacggtcgacattgacgtagcagccgagcccatcatttgattcattgcttcctgcacggcgctcaggtggatttcaccgagtgacggatcggcgccccggccgtctccgccgatcatcaaatccgcgatgattgccgcgtcgctttgttcgacgacgagcaaattgctgccgtcaaagccttctgtgtagttcacttcaatggcaacatacggatgaggaaattcatcactgattttgctttttgaaatgacggtcacactcggtgtcgtaatgtccactttttgatttaaaagagtggacagcgccgtagccgagctgccgaacgaaatattcccgatttctccgatcgcatcgcgctcaagttcagacaagttcgcctcttgaggctgttctgtatcctctgactgactgcttgtgccgttaagaagagcatcgatttcatcttgagataatctattgttcatcttgttcacctcttatgtcgtgatctaaaatttgcactgcctgtcttcgattcacccggccggcctgccctaaaaacttcggtttgtttccgaccaatacagtaagaggatcagtcactgatttgtccagagttatacagtccccgacttccaaacttaaaaattcttctattgtcagttcagaagcgcccaagagagccacaacgggaatttgagccgtcatgatgcgcttttcaagcagcttcgtttcttcgggcttcgcttcattccggtctgattgcatccaataatgtacggaaagcttagggataatcggctcaagtacgacatggggaatacaaagattaatgacaccgctgatttcacctatctgtgtattgagagaaatgacaacgactgtttcatttggggaaaccatctgtacaaactgaggattcacttcaaattcagtcatttcagggtcaatatcagcaatcgattgccaagcttctttgtagttgcccagtgcattttcaaataagttagaaataatattcgtttcaatttccgtaaggctgtcagctttgttatgagtgatgccgatgcctcccatgacgcggtcaagcattgcgtatgcgatggtgggattaacctccatcatgattctgccttccatcggatgaacatcgaataaatttaaaatcgtcatgttcggtatggaacggataaattcttcatacggcacctggtcaactgagctgacggatatatgaatatacgttctgagcttggcggaaaagtgtgttgtgagaagcctcgcaaagttatcatgtatccgggttaaactgcgtatctgatctttcgagaatctgagagcccgtttaaaatcatatacctttacttttttctctttaacttcctttttcagctcttccgcatccgcctcacccgtggaaatggcggaaagcagtgcgtctatttcattttgggagagaacttctcctgacattttcttcacctccgtattctgtcaaatttgtttttattgcagattaaaggaggtaatgtacactttctgaacttttccttcttggagatagctgtttactttctcttttaatgattgtttaaacgcttctcttcctttatctccctcaatctctccggcgcttgtgtcagctaaaatggaaatgatgttgtctttcacctgaaaatcgcgtttttcaagttcttccttcgctttagccgagtcggtttcaagcttgatgccgatacggatgatgctgtcagactttaagtttgtcgtgatatcgtcgacagacacagtggctgcaacgacttcgtcaattgtcggctttttatctttgccggaatgtccgctgacgacaaaatatgctgccgttccgaggccggcgatgacaattaaaataatcagcaaaatgatgactaattttttcttcattcttcttcctctattccctgatccagtgaaaatatttgtatgctatggtaaaacgatatgacttttttgagaactgcttcttccggttctttcacaacgaactttttgccgttggacagtgtaatcgtcgtgtcggggaagcactcaatctgttcgataaacagcgcgttcagcgtaaaaggctggccgtttaaacgggtgacttgaatcatgcaatccggagaagcggcctaaccgcctctcctccctccttaccgtttcagattaaccagctcctgaaggatttcatctgaagtcgtaatgatttttgagtttgattggaaaccgcgctgagcaacgatcatttcggtaaattcatctgtcagatctacgtttgacatttcaagatagcctgccaaaagcttacccgttccgttttcgcccggagtggtgactgcgctcgcagctccggaacttaatgattctctgtaaaggttgcctccgattttttccagaccggcgctgttagggaacgtgaccagaccgatttgtccggcatcatgaaccgcatcccctgcatcagtgtatgtaacggttccgtctgcaccgatgctgtaatctttcgcatcagtcggaatattgattttgccgccgccgattttttcaaggtagtacccgtcagtcgtaacaaggttgccttgattgtcctttccgaaattccccgcacgtgtgtaaacgattcccgaacctgtattaatctgaaagtagccgtctccgtcaatggctaggtcggttttattctgtgtagcctgcggggcgccggttgaatgaacgacatcaatggaagaagtcgcggcacccaggccgatttgttttgaattggtcacgtttgaaccgccggcgactgtctggctgatcatatctttaaatgtaacgcggcttttcttaaatcccactgtgttgacgttggcgatgttattgccgattacatctagttttgtctgaaagtttttcatgccgctgataccggaatataatgaacgtaacatgttaaattccccctgggtttctttttatttagatgtttcgctgacggccgtgacattccacggactgacctctttgccattttcaagcacgagcacgtaattgccgtttgaatgcttgactgaattgactgggcttgtctgatccttcccgtcgctgtcgctgaatgtgacatttttgccgatccagttcacatacatcgtaaacggatcttgattttctacaaatttagtcatcgtcgtattcatattcatcatttgttccaatgaagaaaatgtcgccatctggctgatgaattctttgtcatcaaccggattgagcgggtcctggttttgaacctgtgtcattaagatcttcagaaattcgtctttccctaaattcgtactgctgtttactgcggaggtgctcttcgcgtttgaagtggttgaagcgcccgccgcggcataatccgagtttactgatgtcacctattcttcctccatttcattgagagaaagctcctccagcatatctccgaaatcgcctgactgctgcttgttcttctgctctctctgtccctgatgctgctgtttattgtgatcggccgtctgcccgtaaacaggctgctgatccccgccttgaagcgggactgtaaaacggtcgacctggaccgacatattcggaagcgactgtttcagctgaggaagatgctgttccagcagctctttcgcggactggctggatgcgattattttgctttgaaacatcccgttttcgtttgtcaccttaattgtgacaaatccgaggttctcgggattaagacgaatcgtaaagcttccggttgttttcccgaaaggcgtgtatttcatctgtttccagccgctgatgacctgatccgttaacggtttattttctgccggctgctgttcagctcctgcggacgcttgctgaatgccggcaaggcttctcgttcccgaaaacagtatatgtgcagacaatttgctgtcaggcgcctttgcgtgagaaaccgtgccgccgttttgctgttccgttttcccggctgactcttgggatgattcagatgattgagataacacaaaagctttcagctcagtttcagccatatcccattcctttgttcccttttgagaaaggcccgcaagctgctccgcgacgctttgaaagctcttcagctcagcggctgtcatggagtaaagtttagatgcagattcgtttttcggaaaaaatgtctgccgcaggtcttgaatcacgcggtccggaacaccttgttttttcaatgcctctaataaacgggcgccttcctggtaaaccgcctttgcctgcgtgctgtccggcagttcctgctgagatgtgaagagctggaatacggcttcttgaatgaaaagcaggcccttctcaagcgcatccttgacggaatccccgtcttttgcggaagaatccggctcattcgtttcaggcttcgccccatgctgttttcccgctaacatgtcttcaacggattcggcaagctgtttcaataaaggaagagctgtttcagccgtctgctttccttcaagagcttttaccgcctcaagcagctgtttaagctgcaattctttatcttccgggccggctttcagccaatcaccgattttcgatagggcatcattcagctctgcgtcacttgtttttgtttcatctccgggctgccggggagaagtgatttccgacaggagccagttctgaaatagacctaagctgtttacattcatcttcacattgctgttttgcgcagtctgcgtacgattacccgttaattcaagcagcttcaacttacatcactccttatttccgtcagcggatagtttttctgtatatttagccgcttgttcaggagtcattttcgtcaagatttcagcaagctgctttttacttaatccgtttaaaatatcgagggcttctttttctttcagctttacgataatgcttgccgctttaccgctgtccatacttttatagatgttgatcattttatcttttccggctgaatccgaagcgtcttttttcgtttcatccgtcttcgttttctgctgctgttcagcttcctgtttcagcgaacggattttctgattcagattatcgatttcggacttgcttgtatctaaatctttattcaaaatgttaatttcacttttttgttcctttatggtcttttcaagagaagccgttctgtcttccttctgcttttccgccgcgcttttcatttctttcgtttcgggaaccaattcttttaaaacaggcgttttagcggctgtttcctgaatcggcttcatcacatcaacgccggcagcccaaaggatgatgcttgcgacgatgatcagaaaaatcagcgggatcatgataaaaagcaggattgaaccgaactttccagatctcttttctttttcggccatttcattcgctcctaatgcccctgaatcataaactgcttgattgaaatgtcatccatttccctcatctctgcagctttgtcttcaagtgcgaacatattaaattgtttttcccgcattttttcaaatttctttacttcaatgtttttttcggtgagctgttcctgcttctcattcatttcatttcgtttcatgatgacaagcttttgataatgatagatggtgttctcaagattggaaacgaattgctgataatgtctcatttcctgaacgctcatcccgcatttcagctttgattctttgtctttttcgagcaattcttttttgctcatattttcatatagtttttcagccactgtctcaaattcagaaaccgattgtctgtattcagtcaatgtttggtctttttcattttcttttaattccagcagcttttgaaatctgaattggtacgccatgatgtttattcctcttttcctgtcagactcgtcaatgccgcaatgctgtcttccaattgagcaggttcttccgttccttgttttaaaaattgaataagctgcggataaaactgaatcgcttcatcaatttctcttgatgaccctcttttgtaagctccgatattaatgagatcttcagagttttgataagttgacagaagatcgcggaatttgttggccgcctctatgtgcgctgtgtctgaaatattagacatgaccctgctgatgcttttcaggatgttcacggccgggaactgtcctttgttggcaagcgcccgatcgagaacgatatgcccgtctaatattccgcgcaccgtatcggcaatcggttcgttcatgtcatctccgtcaacgagaaccgtataaaaagcggttatcgttccttgttcatttgcgcccgttctttccagcaaacggggcaaaatagcgaacacagaaggtgtatatccctttgttgtcggcggttctcccgctgccaggccgatttcccgctgagccatcgcgaccctcgtgacggagtccatcatgaacatcacattccggcctttatcgcggaaatactccgcaatggcggtggccgtatacgccgctttcaatcgcattaacgcaggctgatcagaggtcgcgactacgactatcgagcgtttcaggccttcttcgcctaaatccttctcgatgaattcacgcacctcgcgcccccgttcaccgacaagtgcgataatgtttaaatcagcttcagtctgcttcgcaatcattcccatcaaggtgctttttccgactccgcttccggcaaaaatcccgattctctgcccttttcctaccgtcagcagactgtcaatcgatctgacgccgacacccatcttttcccgtatcggcgggcgtttcatcgggtttggcggcggctgttccgtcgaaacgggggacaaacctttcggaagcgcccggccgtcaagaggttcgccgaacgcgtcgacaacttgtccgattaaacccgcccctactttgatgcggagcgactcgccagtggcctccacaatgctgcccggcgctatgctggccgcttccagataaggcattagcagaatgttttcatcctggaagcctacaacctcagctttaatcgcttttttcgcatggcctttcggataaatgagacaaacatctccgattgagctttcgggcccttttgattcaatcatcagcccgatgacccgtttaaccttgccgtagcgtttgtacggatccgctgtttcaattgagtctattaaatactgtgtcttcattgctccgctcccgcctcaagcgccgttaaaagcttttgctttaattgcatcagctgagtgtctatgcctgcatcaacacgtccgaacggagtttctatcgagcacgttcccttcgcggctttttcatcggcatataagcttaatctgcattctttgtataacagctgctgaatttcgtccatatgctgatgaaccgtctcataatattcagggtccacatagatggagatgtcatcataatcttttacttcggctactacctgtttgaccagcagaaggaaagcctctttatcgtcacttttttgccgccatacttttttagcgagcgcaacagaaagctcaataatttcttcctcagcgctttccagtttttcctcgactgattgtctggccatttccataacggcattggcccggctgatgagattggcatattctgcttgagcatcggcttttcccaatgccatgccttctttatatccttctgccttcgcttcttcaatcaatctttgtttttcttccgcccagcggtttttctcttcttcaatctgccgaagagtgtgatccaattgacttttcgcttcttcagacaccctgtcggcttcggccttggcaaaggccatgagtgcctccggattttcaggttcctcccggtctggctgggaatgtgttttcctgacttcctgcaaggatagcttgcgccgtttttgttcaggagaaaatgatgtttgctgtttaatgatattagacaataatatcgtctcctccgcctcgcgcgattacaatttctccggcttcttccagcttgcggacgacgcccacgattcttgattgcgcctcttccacatcacgcaaacgcacaggccccataatttccatttcctctttaaatgtttcaaccatacgctgtgacatattgctgaagacaatctctttgacttcctcgctcgcaaccttcaatgaaagcaggaggtcgtcgttttcaacatctctgatcacgcgctgaatcgcacggttatcaagggtgacaatatcttcaaagacaaacatccgttttttgatttcatccgccaattcaggatcttggatttctaatgaatcaaggatcgttttttccgttcctctgtctacgccgtttaacacttcaacaacggcttctatgccgccggtctgcgtataatcctgcgtaaaggaggaggacagcttttgttcaaggacccgctccacttcatttatgatttcaggagacgttctgtccataaccgcaatccttcttgccacctcagcctgaacgtccgggttcagctcagacaaaatctgtccggcctgcaccgggtcaaggtaggataaaatcagcgccatcgtttgcggatgttcctgctgaatgaaatttaaaatctgttcgggctccgcttttctcgcaaaatcaaacggctttacctgcaaagaagaggtgagcctgtttaaaatgcttaccgctttgtcttctccgagcgctttttcaagcacttggcgggcgtaatttaaaccgccttgtgaaatatagtcctgagcgattgcgatattatgaaattcttcaatgatttcatcttttctttgatgatcgacgcttctgactcccgaaatctcgagagtcaacctttcaatttcttcttcagacaaatgcttgtacacagaagctgatacatcaaggcctaaggaaatcatgaggatggctgctttttgttttcctgtaagcttgttctgatcacgtttcgccattttccattccccctaatcctcgtccagccagcttcgaagcaatttagcaaagtcttccggtttttctttagccattttttcaagctgttttcgtctgactgtttcttccgtttcaattttctcttcgttgatatcaggcaatcgaaccggctccggcggtgtttcatattcatattcttcgtattcatcctcttgtgagcgtttctttctgatgaggagaatgataagcagaataatggccgcaagcagtacgccgcctgtaatatatacccagatcggaagacctgaagattgtgccgaatctgtgttcaggcttgtttttccgtcaaacggctgaacggatacaacgattttattgttgatatcattgtctgtcaggttttgattttgcgtttcgtttttatcaagagacgttctgacgaccgttcctaaaatcttctgtatatcagcctgtctctgtgccgataaggaagcggcatttttcggattaggcggctccaccatgacctgaatgcctaaatcacgcactttatacgggctttccgcgatttctttatgaatgcggttgacttcatagttgattttattgctgcttttttcgtagtccccgctgtttgaaccgccgtttgtctcggcatagttcgcggtgtcattgcttcccgttccggccgtgccgccgttggccgcgccatcgcctttatacgtttccgcgactttttcggcgcttaccgctatgccttccatgttatctttatcgacaggttcgacagtgtcttcagtgcgtttttccttcgtgaagtcaatatccgccgttacagaaacaacgaccttatcctgccccatcattgtgccgagcagtgactgaacatgtttttgaatgtccttttcgacctgcgacttaataccttgctgagatgcataactgtcagaaacggaccctgcaccgctgtcacttttgtcataatatgtagaattttgatccattatgacgatattatcttcttttaagttcggaacacttttagaaacgagatggtacagcccgttgatctggttttgatcaagcgagtagcccggtttcatctgcaaaacgatggatgcggacgctgccggctgatcttcaccgacgaacacggcttctttcggcatattgatcatgaccttcgagcttttaataccgtccatttcatttatcaggtttgacaattcggtctgagtcgcctcaacctttaaaacgtcaaactcattatctgtcaggccgaagcccgcattttgtccgaaaaacgaataatcaattgatcccgttttcggcaggccttccgcggcaagctggactttaagcgaatccacttggctctcaggaacctttatgaccgtgccgccgtcagcaagttcagaagacacctttttcgtatcgagctcttctttaatcttccccgcttcttccgcggacaaatctttataaagaggcaccatcttttcagacgaagtaaaaataataacgacgatgagtaaaataatgaatgcggccaagccgcttaccatgagtatcttctgtgtttttgatctgttgttccaaaacgctgccgttttggttttcatttgcattagagtacgattcatgttaacccccggtcattccagtcattctcttcaatctgaccactacatctgcattctcatgatttcctgataggcttccacggctttattgcggaattcggtagcggccgtcagagaaatatttgctttttgggcagcgatcatgacctcgtcaaggtttacatcctttcctgcagccagttcgttcgttatttggtcagattttacttgtgactcatttaacgaatcaatagagttttttaaaagctccgaaaagcttgtttggtttgaagaatcagttttttgagtttggtttaattgattcgttacgttttgagtgttttgggtttgttgaagctgaaaaggagtaatagcgttaaccacttacatcaccttactttccgatttctaaagcctttaaaagcatgcctttggaggcgtttaatgcagttacgtttgcttcatatgatctcgtgctgctgacaagatccaccatttcttttaatgggtctacatttggtttttgtacatatccgtctttattcgcatcaggattctccggatcataaacgagattaaaagcggacgggtcttccgtaacgccagatacctttacgccatttcccgcgcttcctgttccgttcatcttggaatgtaaaagggacgaaaatgattcgcctccggattggagagataccagctttcttctgtaaggcacccattcgccatttacctgcttcgctctcgttgtgtccatattggccaggttggacgatacgacgtccatccggacacgctgtgcagttaaagcggaacccgaaatatttaagctttgaaagccactcattattttcctcctgtcaagacggttttcagagaattgaatttgccgctcattctttcaaccaaagcctgataattaatttggttttcggctaaatctgtcatttctttgtcgatatcgacattgtttccgttttgctggtacgatgtatcactgctggacacgatagaataatcgtcccttgaacccgtaaagtcaacgtgccgatagtcggtttttaccgcctcaagattggatgtttcctgatctaacaaatttcggaaagagactttttttgccttatagttcggtgtatctatattggcgatgttattagttaagactttttgcttaatgtccgctctccccaaggcattctcaagattttgtatagttccagaaaataagtccaaatccacttacctccatttcagatatttttctcctaaaaatccttgtcgagaattgtaaaaccatatgcttattgtaagaaataacaggcttaaagtctatgaagttaggctaaaaaaaagtgctcaattatatctattttgcatgtaggtattaagtcctagagtatttggactacaagtatttgtttaatataagactgaaaatagcagaatttctgtatcttcctccttttttcacacagcaagatggattatctcagatcagcttccaataagcaactttaaactgcaacttttcacctattgtccataaaaaaagcaggacccccattttcagggatcctgcttttgtcttaatgagatttaaggttttccaattcaataaggaatttgttgttcagaactttaatgtacgtccccttcatacccagagatctggattcaatgacgcctgcgctttccagctttctcagcgcgttaacgattactgaacgcgtaatgccgacacggtctgcaatcttacttgccacgagcaagccttcgtttccgtcaagctcttcaaagatatgctcaatcgcttcaagttcactgtaagacagagaactgatcgccatttgaacaaccgctttgcttcgcgcctcttcttcgatttcttccgctttttctcttaaaatctccattcctacaacggttgctccgtattcagcaagaatgagatcatcatcttcaaattgatcctgcagacgggacagaatcagcgtgcccagtctctctcctccgccgatgatcggcacgatcgttgttaagcccgcttggaacaggtctctgttttccacaggaaatgccgtgtattcgctgttgatatcaaggtttgaagacgtctccggaacattgaacagatttctcgtgtactcttccgggaactggcggtcttcaagcatttttttcatgcggtcattttcaatctgctgattaatagagtagcccaaaagctttcctctgcggctgacgacgaaaatattagaatcaatgacgtcacgaagcgtttcagccatttctttaaagtttacgggtttgcctgccgcagcctgcagcatgctgttaataattcgtgttttttgtagtaaagccatgataaataatcctcctagaattcctcttattaaattttcacaatataaattgacttagatctttgttgtttgcaatcgttccgagcttttcttcaacatattgcggcgtgatggcgactttttccatcgtcacgtccggcgcttcaaacgacaggtcttccaagagacgttccaatatcgtgtgaagccttctcgctccgatgttgtccgtatcctgattcacatgataagccacttcggcgatcttacgaatagcttcgtcagaaaattcaagagatataccttctgtctgcaataaagcctgatattgttttaacagcgcgttatcgggttcgacgagaatcttcacaaaatcatccaccgtcagcttgctcaattctacacgaatcggaaagcggccctgcagctccggaatcagatcagacggtttggccatatggaatgccccggctgcgataaacagcacgtgatctgttttgacggagccgtatttcgtgacgacggtagatccttcgacaatcggaaggatatctctttgaacgccttctctcgatacatctgctgaggaagaagcccctccgttttttgcaattttatctatttcgtcaataaagataatgccgccctcttcagctcttaacacggcctcttggccgacttcatccatatcgattaatttgcctgcctcttcattggtcagaaccttccttgcttctctgaccgtcattttgcggcgttttttcttttttggcatcagattgctcagcgcatcctgcatattcatgcccatctgctccatcccggagccttgcagcatgtcaaacatcgacggctgctgctcttccacctctacggagacgtaatggtcttcgagctctcccaatgcgagctgatgcgccatgcgttttcttttttcttcaaggcttgcttcttcctgctgatcggcttcatcatcatttgccgtctgacttcctccgaaaagcatttcaaacggatttttcacacccgcttgttttttctttcccggaacgagaagccgcacgatacgtttgtttgcattttcttcagcctgttctttcacttcgctgattttttcttctttaatgagccgcacggatgtctcaacgaggtctctgaccattgattcgacatctctgcctacatagccgacttctgtaaattttgtcgcttcaatttttataaatggcgcaccggtaagcttggcgatccgtctggcgatctctgttttccccaccccggtcgggcccatcatcaggatgtttttgggaacgatctcgtctctcagtttttcatcaagaagacttctgcgatagcggtttcttaatgccacggcgacagcttttttcgcatcctgctgtcctacaatgtattgatccaaccgatctacgatttgtctcggtgttaacggtttgttttccatgcgcctcaagtcctttctattcaagttcttccaaaatgatctgatcgtttgtgtacacacaaatctcgcctgcgattttcaaagcggcttttgcaatatctttggcggacagattctctccggcataggttttcagcgctcttcctgctgacagggcgtagtttccgccggagccgattgccaaaattccgtcatccggctcaatcacttcacctgttcccgatacgagaagcaaggtatcctggttcatgacaatcagcatggcttccagcttgcgcagcactttatcgctgcgccattctttcgcaagctcaaccgacgcacgttttaaattgccgttgtattcttcaagcttcgcctcaaacatttcaaaaagtgtgaaagcgtctgcaacagatcccgcaaatccggccagaacctttccgttaaacagctttctcacttttctcgcggtatgtttcatgactacagcctgaccgaatgtgacctggccgtctcctgacatagcgcttttcccgttatgctggacggcaaaaatcgttgtcgcatgaaaagatgacatgagaagggcctccttttaattttctttaaaagctctcgggtggtgggacatatatgtgtttctcagcatttccttcgatacatgcgtgtatatctgcgtagaagacagattggaatggcccaaaagctcctggacgcttcttaaatcagccccttcattcagcagatgagtcgcaaacgtgtgccgaagcatatgcgggtgtatatgtaaagtgccggatgctttttttacaagcccgcttaaaatataccggattcctctggcggtcagcgggccgcctctttgattgacaaacagcacatcatgaggctcttttgctttttcaagcaggcactgccttccgctgttgatatacagctccagcgcatcacgggcatatgagccgaacgggatatagcgctgcttcttgcctttcccgtgaacgagcaccgtatccatgaacaggtcaagatcgccgacagtgagcgtacagcactcactgaccctcattccggtcgcataaagaagctcaagcagggcctgatcgcgcatccctgacggctgacttctgtctgagacagcgaatagttcctcaagttctttttcataaagaaacttcggaatccgtttctcttgtttcggcagatgaacaagctgaaacggattctcttcaacaagcttttccctcattaaaaatttatagaagcttctcaaagctgaaattttcttgctgattgttcttcttgacaggcctttttcataagcctctgtcaaaaatattctcacatcatgatatgcagcttctttcattccatttatattttgagcatgcagaaacatcccaaattcttcaatcgaattaacataattcacaatagtatattgtgaataatttttttcaatttgtaaatattcaacgaataactttaaaaaaaagttaacattctcagtcattatgaagacctccctctccgaagggcttttaaatggtatcatataatgcatcgaagttgcaatgaaaagctatatcgttttcgaaatagtttgaatagtctcaattgcgcgtttagcgtattcttcatttcgttcttttttgtttttaatttttacaggcaattcttttaagaggccgaagtttgcattcatcggctggaagttcttctgatttgtcgtcgtaatgtagtgagccatgcttccgatcgccgtctcctgcgggaatgtcacaagatcctgaccgagcacaagtttggcggcattgattcccgctacaagacctgaagcggcagattcaacataaccctctacaccggtcatttggcccgcgaaaaacagatcgttccgctgtttaaattgatatgtcgggttcaaaaggctcggcgagttgataaatgtgtttctgtgcatgacgccgtatctgacgatatcaacattttcaaggccggggatcagtttcagcacttctttttgatctccccattttaaatgtgtctgaaaacctacaatattataaagcgttcccgccgcgtcatcctgtctgagctgaacgactgcataagggcgcttgcctgttttcggatcttccagtccgaccggtttcatcggtccgaacagcatcgttttcttgcctcttttcgccatgacttcaatcggcatgcagccttcaaagaagatttctttctcgaattcttttaaaggaaccgtctcagccgtcgtcaatgcttcatagaaacggtcaaactcttcctctgtcatcgggcagtttaagtatgccgcttctcccttgtcataacgggattttaagtacactttatccatatcaaggctgtctttttcgacaatcggcgccgccgcgtcataaaaatacagatactcttctcccgtgagctctttcagctgctgtgaaagcgattctgatgtaagcggtccggtcgcgataaccgtcgggccttccggaatctctgttacttcctcagtaagaaccgttacgttcggatggtttttcacgagatccgtcacgctttgcgcaaattcatggcggtcaacggcaagcgctccccctgccggaaccgagcatttatcagcagattgaatgattgctgagtcaagcgcccgcatttcttcttttaatacgcctaccgcattggcgagtgtatttgaacggagggagttgctgcataccagttcagcgaatttatcagtatgatgggctgccgtctgcctgacgggccgcatttcgtatagttttacttgaattcctcgttttgcaagctgccatgccgcttcacttccggcaaggcctgctccgattacattaactgtttgctggttcatttcttttcatctcctgttgtttgtcccttccacacaaagaaggtgagcaaggctctgctcaccgctacttctgtggttcttccttataatcgcattcgacgcattggacttgtatgccttttttaagctttttctctacgagcatattttcacatttcgggcattttcgttcaatcggtttgtcccaagatacgaagtcgcattcaggataacggtcacagccgtaaaagacgcgtttcttttttgattttcgttcgacaatatttccttcatggcacttaggacattttacgccgatttgtttaacaatcggttttgtattccggcagtcagggaagttggaacacgccataaatttaccgtatcggcccattttataaaccatccgggagccgcataattcacaatcttcatctgcgtattcaggttcaatttccacttctttcatttcagcttccgcttttttcacgcgtttttcgaaatcggtatagaagctgtcaatgatttgaacccattctgtctcgccatcttcaacatggtcaaggtccctttccattttagccgtgaattcaacgttgatgatttccgggaaaaactccatgataagatccagcacgatctgcccaagctcagtcggcacaaaccgtttattgtctaatcccacgtaaccgcggcgctggatggtgtcaagagtcggcgcatatgtcgaaggacggccgatccccagttcttcaagcgttttaaccaggcgcgcctctgtgtaacgcggaggcggctgagtaaagtgctgctcaggctcaatatcttttgataaaaccgtgtctccctctttaaggtccggaagcatgcggtctttttcttccagctgatcgtctttaccctctacatagactttcatgaagccggcgaatttgactttacttccgtttgcccggaatgtcaatccgttattgctgagatcgacgctcatcgtatcaagtacggcaggcgccatctggcttgcaacaaaacgctcccaaatcagcttgtatagtctgagctggtctcttccaagcaccgcttttaagtcggcaggttttctgagcaccgaagtcgggcggatcgcttcgtgggcatcttgagcgttttcatttttctttgccggtttccgttttcccgctaagtactcttttccgtatgcctgatcaataaaagctgacgcctcttcaacggctgtattggaaatccgcgttgagtccgttctcatatacgtgatgagtccgactgtcccttctttgccgagatcaattccttcatataattgctgagcgatcatcatcgttttcttcgctctgaaattcagcttcctggcagcctcctgctgcagagttgacgttgtaaacggcagagcgggatttcgtttgcgctcttttttcgtcaccttgtcaactgtatacttattgcctttcagctgagcaaggacggcttttacgtcttcttcgctttttaaaggaagctttttgccgtttttcccgaaaaatccggcttcaaacgtctcttttccctttaaaaatgagccggtaatcgtccagtactcttcaggtttaaagtcattgatttccttttcccggtcgatgatcagccggagcgcaacggattgaacacggcccgcactgaggcctttttttacttttttccaaagaatcgggctgattttgtatccgacgagtctgtctagtatgcggcgcgcctgctgcgcatcgacaagatccatgttaatcatgcgcggatgtttaaatgattctttaatggcgtctttcgttatttcattaaagacgacccggcagtccgagctgagatccagatcaaggctgtgtgcgagatgccatgcaatcgcttctccttctctgtcggggtcggccgcgagatagactttttttgctttctttgccgctgtttttaattcttttaaaacagggccttttccgcggatcgtaatatatttcggttcaaagttctgttcgatgtcaactcccatttgacttttcggaagatcccggacatgtcccattgaagctttgactttatatttcttccctaaataacgttcaatcgttttcgcctttgccggcgattccacgatgactagataatcagacattttcatccccctcaagaggtgttctctctcttttcaagtatcaattcattttagagctgcctttttatggctttcaacatttcattctttatgatgaacgtcattttatacatgaaaataatatgcaactttaaatcctcactattattaaatattacaataccgtttgtcaaacgatatttcaaaagggttccgtatactgaacgcatcgggcggtcagctctccgtcaatatcctctgcgcataatacagctttcgccccttcttgaatgagttttataggtcctccggaatatggattaaatatggaacccggaacggcaaatacctctctgccttgatcgagggcctggtaagctgtgattaatgaaccgcttttttcttttccctgcacgaccacaattccttcacttagtccgctgattatgcggtttctcatcggaaagtgccattttttcggctttgtttcaggaggatgttctgagagtaggagatggtgttcagccatgtattctgctaacaggagattttcccggggatagatgtgatggaatccgccggctatcacgccgatcgtaagcccttttgccctgatgctcgccttatgagacaaaccgtctataccggatgcaagcccgcttacaatgacccagcctttttttgagagttcggcggaaagatgcccagccgcttttattccgtcttccgtcggtttccgcgttcctacaatcccgatttttctgcctttttcaagaagcggtgtgttcccttttgcatacaagacagccggcggatcataaatcgctttaagccatgttgggtagcagcttgatgaaatcggaataacagtaatgccttcgcggcggtaatcggacagaacttcatcaagttccggatccttgcgctctatttcccgaaaaattgcttccggggctgttttcccctctgataaaacagttaatggatgcggatccgaaaaaaaagacagagagtgatcagctttccaccattttaatagaagagacggggaaatgatttgattaatactgcagaccattaaacagcgcgatgcttgatccaaatctggcaacctcctcttttttcagcaaaaacaggaacagccgttacggctgcccctgcttcgatcagtgcgttttgcacgtttcaaataagcctttttcttttaacaccttaatcagcgtttcacccattacagaaggggtttccgcgacttcaattccgcaggcgttcatcgttttgactttttcttctgccgtgccttttcctccggagatgatggcgcccgcatggcccatgcgttttcccggaggcgcggttttaccgccgataaagccgacaacaggcttcgtcatgttcgctttcacccactcagccgcttcttcttcagctgtgccgccgatttctccgatcatgatgacggcatgtgtttcaggatcttcattgaacgcttttaacacgtcaataaagttcgtgccgttgaccggatcgccgccgattcctacagcggtagactggcctacgccggcttctgaaagctgatggacggcctcgtatgtcaatgttcctgaacgggatacaacgcctacatgaccctttttatgaatgtatcccggcataatgccgatcttgcattcttcaggtgtaataacacccgggcagttcggccctattaatctcgttttcttgccttccataaagcgcttcactttcaccatgtccaaaaccggaatgtgctcagtgatacaaatgacaagatcaatttccgcgtcaaccgcttccataattgcgtccgccgcaaacggagccggcacgtaaatgactgacgcatcagcgcccgttgtatgaaccgcttctgcgaccgtattgaataccggtacgccttccgcttccgttccgccttttccaggtgttacaccgccaacgatattcgtgccgtattccagcatctgctttgtatgaaataaagcggtagaacctgtaatcccctgtacaataactcttgtatctttattgataaaaacactcattatctggtcccctgcctttcattctttcctaaactaaggatacgattttctgtgcgccgtctgccattgattccgcagatgtgatgtttaagcctgattcattcaggattttctttcctaaatctacgtttgtcccttcaaggcgcacgaccagcggcaatgtcaatccgacttgtctcgtcgcttcaacaacgccctcggcgatgacatcacacttcatgatgcctccgaaaatattaacgaaaattccttttacgttttgatcggaaagaatgattttaaaagcttccgtcactttttctgcggttgcgccgcccccgacatcaaggaagtttgcaggttctccgccgtagtgtttaatgatatccattgtagacattgcaagacccgcgccgtttaccatacagccgatatttccatcaagggaaatgtagcttaaatcgtattttgacgcttcgatttctttcggatcttcttcatctaaatctctgtattccataatgtctttttgtctgtataacgcattgctgtcgaagttcagcttagcatccagcgccatgacgtttccgtcccccgtaacgacgagagggttgatctcggcgatggagcagtccttctcaacaaatgctttatataaaccgagcataaatttagcggctttgccgacaagctctttcgggatgttaattgcgaatgcaatttcccttgcctgatagccctgaaggccgacagccggatcaattaccgcttttttaattttttcaggtgttttttccgctacttcttcaatctccgttccgccttcttcagacgccattaaaacgattcttgaagtagcgcggtcaagtacaagcccgacatagtattcctttttaatatcgcagccttcttcaataagtaagcgttttattacttgtccgtccggacccgtttgatgtgtgacgagcgtcttgcctaacagttcttcggcatactctttcacttcatcttttgtttttgcaatctttaccccaccagctttgccgcggccgccagcatggatttgcgcctttacgacataaaccgagcttgacaggctctctgctttttcaactgcttcctctgctgtaaaagccactttaccttcaggaacagacaccccgtattttctgaggacttcttttccctggtactcatggatattcatttcccatcctcctaacttatgtagcaaaactaaaaatagactgcgctttcattctatataatactggaagaattgtctagggttcaaaacaaaatctttatatccttccaaacattctaacttttattttattgaaaatataaatttaaacggagtccgggaaatgaatggtccttatttttcgtttttcagggttttgtccagtctgtaaacaaatgaaaaaatttcggcaacggtttcatagagcgcctccggtatgtgatcgtcaaccgtcaaatggcgcattaattcgacaagggttctgtcttcctgaatggggaccccagccttctcagcttcttttataatattttccgccacgtgccccctgcctgttgcgacaaccttcggggcttggtctttctgccggtcgtaatgcagggcgacagctcttcttaacggcgtttgctctttcatattttcacatccacttttcttccgccgtctttttctataaactcttccacaagagcgctctggtctttcgggcgccgttttttagacgtgacgcctgacaggctgaagcccgtttcttttacggcttcttttaaagccggtacgagagggtcgatggccgcctgaagctcaaaatcagtctcaaccgtaatggtcattacattttgctgaatcacgcagtccacaacggtttcttgcagtgtttcaagatgcagcaaaaacaggagcctgcaatgtgacggatcgagttttccgtccggcttcttccgtcctttaaagagaactgtgatgtcattctcatacgcggacgctcccagcggaaatgacagcaccatctgcgtaaaagaagggttatgctgctcaataaacagctggccgtttaatttatgaataagcggttccgcctcttgtttaacggattggggcgcttcttgaagcgtccggacggcttggagggccgttttcagcgcttgtttctccggctgcggagatacgcctttttcaagcgctgtaatgaatgataattcatcacgcgtgcccaatccttttttgattttctgcaaaaggcttaatacatcatgtttttccgcatatttcaattcggtgagctgaacggctttttcgaaaacagccgcctcctgttctgtcagatgtgctttttgaagaacaggtgctgttttaaatgttttttcttgagaaatgaaagccttaatgatctccgccgttacttttacggggcggttttcagttttttctgccgatgtcattaatttctctataatctgttttgccgttttttcaggaagtttttgatctgtccgcgcactcggaggagaaggttggcttgagactgcctttccgttttcacgagtctctcggacaaatggtgattgttttgattccgtccgttcttcttcatccatcagcccggtttctgggatcggcatgcgtgcagcctcggcaagcttcttcaagagacgttctgcatgaagatccgtttccgcgtttaatacgtcagaaaccgcctctttgagcacagacagctcttttgccgattgcggtgcctgattgattgcctgaagcagtcctgagaggaggcgccgggtcggaaccggatatttaacggcatgaatggctgacaagacttccggatgtgcgggcagttcccgtttcagcgcaaatacgattgtttccgccgcttttttcaattcggcggccggaagcgattcagcccagcggacgcaggctttgaggctgttttccgtcatcggcagcttctgctgcataaacgtttcggcaatctgcagagacacagggcccggtttgacggaaagagcgtttaacagtctacccgccgcttcctgaacggttttcgggcttccttcgaattggtcgatgacatgaagccggcccgttttttccgccggctgtttgtcataagaaaaccagtaatacgcctgcggacgaagggcggtttcaagttttccctgcatcgtccggccgccgatctggataagagcgctttgatcgtccagcaaacggagaaccttccctaacagcagcctttgagtaccgctgtctttaccgccgtcctgccggtccggagggatttccgccgtcagctgtctgaaagccgcttggatttcgccgctaatgttcatgtcttaagcctcttttctaacaataagattgaacgggagcgaacgtttttcggtgaatagttgtcggtccgtatgcctgaagagcttcaagatgttctttcgttccgtagcctttatttttttcaaagccgtacatggggtaagttttggcgtactcagccatgagacggtcccgcgttacttttgctatgcaggctccggcggcaattgacacgcttttggcatccccttttataactgatgactgcggaatgtcaagcggaagggtcatggcatcaacaagcagataatcaggtgtttccgttaaagcattgacggcttttaccatcgccagtctcgcggcctcataaatgttgatccggtcaatgacgtccgcatggacaatgccgactcctacagccgccgcttcttccgtgatccggctgtaatactcctcgagcttcttttccgacaatttcttcgagtccgtgagaccgagaatctcgcattctgccggcaaaatgacggcgccggcgacaaccggtccggcaagcggccctcttccggcttcgtcaacacccgcaatcaggcggaagccctttttggatgacagtctttcgtatgccgtcatgtccagccattgctctttaagagctttttccttcgcatgctttttcagccattgctctaaaagcgtctgtacgctttttctcgggtctttctcacattgggcaaggaaggggtcgctttcgtccctgatctcttgcaggcgttcttttacgctttttacggttaatgtattcacgttctcttctcccttacattatgtatatcggtattctgcggaaaaaataaagacccgcatcgctgcgcgtctttattctgatggtgcttcaaatgaaagcctgccgaatttttccgtccggatgtcccgaatgataacttccgttgttttatcatagtcaaccattccgccgcccatcaaacagccgcgtttttcaccgatcgcgtcgaaaagagcggcgatatcctcagggatttcctgaagtccgtagcgctccttcaaacggtcgggataatgctcttccagaaagcgcagcccgaaaacagccacatcctgcaggttgataatcgtatctttaatcgccccggtgatcgccaggcgcaagccgacaagctcatcttcaaatttaggccataaaattcccggtgtatcgagcagctctaattccttgcctacctttacccactgctgtgaagtggtaatgccgggcctgtctcccgtcttggcaatgttttttttggccagccggttaatgagcgtagacttgccgacattcggaatgccgatgattaatgcgcggattgctctcggcctaacaccttttgctttcattttatcgaacttatccttcagcagctctttcgaggacggcacgatttgatgcagtccctgcccgttaacggagtttattgaaagagagggaatgccctgttcctgaaagtggtccttccactgggcagtcacagccgcatccgccttatcggctttatttaaaagcataatgcgcggcttattttttaaaatctcctcaatcatcggatttctcgatgacatcgggattctcgcatccaccaattcgtatacgatatcaattaatttcagtttttctgttacttcccgtctcgctttagccatatggcccgggaaccattgaatggtcatgtgacttcgacacctgccttatttaccggaaccggatgttccgatgatctcttatgtattttacgttgcttgttccgcttttacaaatttcatataaaaaaagagcctgttacgggtaacaagctcttttcgttcgttatcattatcgtctgatttctttaatacgagccgcttttccgcgaagttcacgcaggtagtaaagcttagcgcgacgtactttaccgtaacgtacaacttcgattttcgcgatttttggtgtgtgtacagggaatgtacgttcaacgccaacaccgtaagaaatcttacgaactgtgaacgtttcgctgattccaccaccacgacgcttgatcacaacaccttcgaagatctggatacgctcacggttaccctcaacaacttttacgtgtacacgtaaagtgtcaccaggacggaacgcaggaagatcagtgcgaagctgttcttttgtgatatcttgaattagtttttgcatcgttttcaactccttccaacagatgctcttggccacaactgcaaggcacagcggaacatcgttttcaagcttctgaaggataagcctccttaagccacaagtagtatcttatcatatcttcatcacctgcgcaatagaatctattcgttttcccactcggaaatccattttctttgctcatcagtgagaggatagttttcaagaagatccggacgtcttaaaaaggttcttctgattgattctttattgcgccattcttgtattttggcatggttgccggacaaaagggtctcaggcacttttaagcctttataatcggctggcctcgtatagtgaggatgctctaaaagccccgtgctgaaggaatcctccacgtgggatgcttcttttccgaggacgcccggcaaaagcctgacaacgctgtcggcaatcatcatggcagggagctctcccccggtcagcacaaaatccccgatggagatttcatcagtgacaagatgttcccggatccgttcatcatacccttcataatgcccgcaaataaacatgagatgttcctcttccgccagctcctcggctttcttctgcgtataacgctcaccttgcgggcagacgagaataatgcgcggcttggcgtccgtaccggctgtcagcttttcaaccgcatcaaatacgggctgcggctttaacaccatcccggctcccccgccgtacgggtaatcatcaaccgtttggtgtttattatccgaaaaagcccggaaattgatgacgtcaaaacggacagcctctttttcctgtgctttttgcagaatggatgagccgagcaccccttgaaacatttcgggaaacagtgttaaaaagtcgattttcattcgtctattaacccttccattacatgaatcttaattttcttctcatttatattaatatccttcaccacagaagctatatacggaatgagcgcatcttttttgccttttcttgcaaccacccatacgtcattagccccgggcgtcaagatttccttcactgtgccgatcagttccccgtcttctgacacaacctcgcagccgatgatttcatgaaaataaaattcatcttcttcaagctctcccaagtcttcttcaggaactttgatcaccatgtttcttaggtgttcgacttcattgagactcggcatttctttgaattgcagcaggtgaaactgcttgtgaagcctgtgggcgctgaccgttactttgattggctccgcagccccttccgcaaacaaatagagcgtattgccgggcttgtaccgttcttcggcaaagtccgttttagaaatgacccgcacttcgcctttaatgccgtgggtatttacaattttgcctacattaaaccatctgtttgtcatattatcacctcgggcggatttcaattactaccccgtcttttatgacgatggtatttgccgctgttttttcatgccagttatcaccgacgttgattgaaagcagcgcatcgatctccttttccttcacttcgcttccaagcgggagcgactctgtctggcttatttggaaatcaatcattttgattttatcttgtcttttttcaatggcttttttaaaagattccgctacatcgggattctgctgatctttttcatgttttctaagctgaaaatagagctggctgcattctcgttcaagcgtttgctttttttctgcaaaagaggccaaaagcttttccttgctttgctcggtcagaacctgcataacggttaccctgtgaataatctgcataggaccagactccccactcttccaacatatttctgttcatttgccttttttacgtgtaaaaaaaggggaggtgccggccctctccctttttcagtcaaatatttcaaattgaactttcttagaagactgtgcgccagctgcaaaaacgacggttcgaatcgctcttgcagtccggccttgctttccgataatcttaccggtatccgacttattgacagataagcgtagcgcaatcttttgatcagtctcttcctttgtgaccgttatgtcttccggatggtcgacaagcggagccacaatgctgacaatcaaatcttccaagttctgatcagtcattacttgccttgtttagcgttgtggaatttttccataattccttggcttgagaacaagttgcggactgtatcagaaggtttagctcctgtttgaagccatttaagagcaagctcttcattgattttcacttcagccggctttgcaaccgggttgtatgtgccgactgtttcgatgaaacggccgtcacgcggtgaacgagaatctgctacaacaatacgatagaaaggagatttttttgctcccatacgttttaaacgaatttttactgccattttactagcacctccgaaaatatttcaacaagatagtatattaacaatgataaaagtgtttgtaaagtgttttttcttaacaacggttttatcatgtataaccgattacataaaaggtaatttaaagccttttttcttcccttttgacatgttggtcatctgcttcatcatttttttcatttcctcaaactgctttaaaagacggttgacttcctgaacggatgttccgcttcctttggcaatccgcttccgccggctggcgttaataatatccggctgttctttttcaagaacagtcattgatttaatgatcgcttccacatgattcagctgtttttcatcgacttggatgttttttaagcctttcattttgcctgctccgggcatcatttgcagcagttcgtcaagaggccccatgtttcggacctggccgagctgctccagaaaatcatccaatgtgaagctcatcgttctcattttctgctcaagctctttggctttgtcttcatcaacggtcgcctgagctttttcaatcagcgtcagcacgtcacccattccgagaatccgggatgccatccgttcaggatggaacgcttcaagagcatcgagcttttctcccattccggcgaatttaatcggcgtttcggtgaccgcgcggatagaaagcgccgcacctccgcgggtatccccgtcaagctttgttaaaatgacgcccgttaaaccgagctggtcattaaagcttttggcgacgtttaccgcatcctgaccggtcattgagtcgacgacaaggaaaatttcctcaggatttgcgacttcctttacgccggagagctcatccatcagttcatgatcgatgtgcagccgtccggcggtatctaaaatcacataatcatgatgctcttccttcgctttttcaatcgcctgtctggcaatttccaccgggctgacctgatcgccaagcgaaaagaccggcatatcaagctgtttccccagtgtttccagctgtttaatcgcggcggggcggtaaatatccgcagccacgagcagcggtttgcggttatgttttttgcgcagcaggttggcaagcttccccgtggttgtcgttttaccggcaccttggagcccgaccatcataataacggtcggcgggcgtttggcggcggcaattttgctttcttcgccgcccatcagctcggtaagctcttcttttacgactttaataacctgctgaccgggtgtcagactctgcatgacgtcctgcccgacagcccgttcacttacttttttcacaaaatcctttacgactttaaagttaacgtcagcctcaagaagcgcaagacggacttcacgcatcatctcttttacgtcttgttcgctgacttttccttttccgcggatttttgaaatcgtcttttgcagtcggtcggctaatccttcaaatgccattgtttgccgcctcctaatctaatttctcaagcgcttcaatcagagccgtcattttttcctcttcctgcaagccggaagcaagctctttcagctttgtaaacatttctttacgctcctgaaactttttaaaaaggagcagtttttcttcatattgttcaagcatcgcttcagtccgtttgatgttatcgtaaacggcttgccttgaaacgtcatactcttcggctatttcaccaagggagaaatcgtccagataataaagcgacatatagctcttttgttttgacgtcagcaacgactgatagaagtcaaacaaatagttcattctcgtcgttttttcgagcgacatttgagctctcccctttgttaagtcaaatccctttacaaaaacttagtttacatggtttcagagcgtgtgtcaagtttttatcttgtcaaagcaggatgctctttttacataataagtgttttcaaaaaaattcatacagaccgtcgttaaaatactcgaattcttgttttgatacacgatagcggcaatagccttcgtaaaaagcattgagacatgattcatttgtgacaaaacgactgatcgctaatgattcatcataacgcggatctcccgccgatattcccgcagcatcgataaacagatagacctctccgtctctcaccagcacattatcagtcgtgcagtcaccgtgaatcattgtctgctgaacaggaacaggcctgtacctgtccaattccttcaaaagctctgcacttccttcagcttgtccttttttgacatattccccggctcgtttgatttgcagatcgagccagtctgtttccggctgtaaaccagagaccatttcggtttcatgcagccgctgcagaaactggccgaaacttttgatcagctttttcttttcagtatcccctttggcttttcttaaagccgaagtcagggtgattccatcctcaaatgacatgatgatatggctggcatgctgttcctgtatcatcccatagtaaataggaacaggcagacgacgagtttccgtcagttgttgtaaaacgaaggcttctctcattaaccattcccgatacttctgttgaaaagaacttttcagcaaaaatgcgtcttgaccggtcactatttttcgaacggttgaagtgcctccctgttcatccagcagcgacatatggtttatcgcgccgatcttactttccaattcagctttcagccatttgtccaacaactgccccctccattccgatctatcaatgcgtataaaaaaacgagtataaaaccgtccattttatactcgttttttattcattaatcttcggctttttcaactaaatccgaaaagagaccgtatacgtaagattctgcatcaaaccgctggagatcgtcaaccttttctccgaggccgaccagtttcacagggatgtgaagctcattgcggatcgccaggacgataccgccttttgcggtgccgtcaagcttcgttaatgcgatacccgtcacattcgtcgctttggagaattctttcgcctgcgccatcgcattctggcctgtcgtcgcgtccagcgcaaggagaacctcatgcggggcctcaggcacttcgcgttcaatgacgcgtttgaccttttcaagctctttcattaagttaactttattctgaaggcggccggccgtatcacaaatcagcacatccgctcctcttgctttagccgcgtgtacggcatcataaataaccgccgcagggtcgcttccggcagcctgcttaatgacaggcacgcctgtacgctccccccacacttcaagctgttcaatcgccccggctctgaaagtgtctccggcagcgagcacaacggatttgccttcattcttcagcttatgggcaagttttccgatcgttgtcgtttttccgacgccgtttaccccgacaagcagaataacgttcaggcgcccgtcctgaatatttaattcagaaatctgttcgtcgccgctgttataaatgtcgacaagcttttcagaaatgacggactgcacttcctgaggatcctgaatgtttttcagcttcacttcttttttgagctcatcaatcagctccatgacggttgtaaaacctacgtcagcgccaatcagcacttcctcaagctcctcgaagaaatcctcgtcgactttccggtagcgggagacgagttcgttcactttatttgagaaggaatttcttgttttttcaagaccatctttaaatttttcagagacggagtctgtctgtttcgtgattttctcttttaattttttaaaaaagctcatctttcaacctctttcctcgttactgaataaattcttttgtttcttccagtttgaccgaaaccattcgggaaacgccggattcctgcatcgtaacaccgtagaggacatccgcttcttccatggtgccttttctgtgggtgatgacgataaactggctgtcgccgctgtatttttttaaatattgcgcaaacctgaatacattggcttcatcaagcgcagcttccacttcatcaaggacgcagaacggcacgggccttactttcagaatagagaataaaagggcaatggcagtcagcgcccgttctccccctgacaaaagatttaagttttgcagttttttgcccggaggctgcgcgataatgtccaccccggaattaagaagatcattcggatcagtcagcttcagttcagcccgtcctcctccgaataaagaacggaacacgtcgttgaattgagaacggatctggataaacgtttcatggaatcgcttcgtcatttcagaatccatttcttcaatgacttgaaacagtgtgtttttcgcttccgtcaggtcatttttctgctctgttaaaaactgataccgttcgtttactctttcaaactcatcgatgctgccgagattgaccgttccgagctcttcaattgaaagcttgatcagtttgacccgttttctcgcctcttcaggctcgagttcaagctgatattgttcttttgccccttcaaaggataagctgtactcctcgcgtaaatactgcaagagattatcaagctcaacttccatccggccgagttttacctcttcatctttcagaatgtccgttttttgcttgtacagacgcttcatctctttcagctcaagctcgttcgtatcaagagcccgctggagcttcacacgctggtcgcgccggctggcgatcaattcgatcgttctcgttttatcgtgaagcttatgatgggctgcttcttcaagctgctcctcaccgcttgtgctggacgtcatctctgaggtcaggaggcttaaatcttcccgtgtttctttcagagcgagctgcgtttcttcaagctcttttttcagccttttgaggttgtcttcctcactcgagcacgcctgttcttttttcgcagcggccactttacattccgtcagttcatgagagagcgtttcttttgttgaggatagggtctgcttttgttttgtcagcctttccatctcttcctcaagctctttcagctggccggatgcctcactcagctgttcttccagagctgatttgcgcgtctctttttcccggctgctttccgtcagtgatgctttctcctggtcgtaaagctccagatgggtattgatgttcttttcagcaacttcgagttcatacagcctgccttttacatcctgctgctttgttctgaaagcctcaccgtcttcacggagaccgctcagcgtatgttcaagctcttgaatggcctgcttcagcgctttgacctctttttcgagcagagctgttttttcttccatttcggcaagccgcgcagtcaccgtctcaagctcgcggcttctgccgagcagagaattgtttttctttttgaccgcgccgcctgtcattgatccgcctggattgacgacatcgccctcaagcgtgacgatgcggtagcggtgcccgagaagcttggccagttcattcgcgccttttaaatcttcagtgatcagcacggtgccgagaaggttttgaatgacattccgatacgccgcatcatatgtgacaagcccgctcgctgtgccgaggaaagacggatgctttgaagccgtctgttcatcacgggtttgaagctggcgcggtttcataactgtaagcggcaggaacgtcgcgcggccgaaggaattctgttttaaatattgaatcgctttccgcgccgcctgctcatcgtctgtgacaacgtgctgcgccgctgcgccgagtgcaatctcaatcgccgtttcatatttttgttcggtcgcaatcagttcgagaacggcgccgcggatgccgccgagctgctctttctgcttcagcacttcttttacgccttggtaaaatcctgaaaaatcgccttgcatcgtttcaagcatatcttttttggatctggcctgctggacgaattgatatgcctgatacagcgctgattctttcttttcatactggcgttttttctgttcatatgctgtctggacttcgcgaaagcggacgacctgattgtgaatatcctcttcaacggcggccaattcctcttcgcacgccgctttgcggactgcaatatcgttacgttcttcaaggtatttttcattgtttgcggtcagtctcgcctgctggaccgcagattgggacatctgatcatctaaaagctgcagctcgttgcgaatcgacgcctggctgtttaacaattcaaagtaatcgctttttaattgttcgattttctcttctacattttcattatgcagactgagagcctgctgcttttctttcacctgggcgtttaaccgcttcacttccgcacgaagtttatcatagacggcagactgtttttcaatgtccgctttcagttcggcttctttgttcgtgtaatgtgtaacggattcctctagctgttcccggttttgcgcggcgttttttttgcgctctttcagcacttctttccggccttccagcttttccagctcttcacttgtcacgagcagcacctgctgcagttcgttgacggattcatcaagcgcgtggattttatctctcgtctcttctatcatcgcttcttttgcggacagagctgatgattccgccaattcttcttgttttgccgtctgcaccttttcttttaaacccgaccatctgctatgcagttgttcgatgtcaaaggcggtaagggcgatttcgacatgctcaagctctttctttttttctaagtagtctttggcgattgatgcctggattttcagcggttcgacctgatcttcaagctcgtggagaatatcttccaccctgtttaagttatcctgcgtctcaaacagtttgttttccgcttttttctttcgtgttttatatttcagcacgccggccgcttcttcaaaaatactgcggcggtcttccgctttgctgctgagaatctcttcgactttcccctggctgataatggagaacgcttcttttccgagcccggagtccataaataagtcaatgatgtctttcaggcggcactgctgattgttgatgagaaattcactttctccggaacggtacacccgcctcgtcacgctgacttcgtgataatcgatcgggagaaaatgatcttcattatcaagcgttaacgtgacttcggcaaggttcagccgcttgcgcgaatcacttcccgcaaaaatgatatcttccatttttccgccccgaagcgagcgggctgattgttcgccgagcacccagcggatggcttcggtaatgttgctctttccgctgccgttcggaccgacaacggccgtgacgccttttacaaagtcaacggatatccgttctgcaaatgatttaaatcctataacgtctaaacgtttgaggaacatcccagatcctccttatcgtataagtatctcaatattatcataatcacccgcttatatcaggcgcagacatactgaaatcccctagggatacagggggattttattgtttcgtatgatgtttttgcaattttgcaagagcttcctgtgccgcatgctgctcggcttcttttttggaacgtccgttcccgataccgagcgcctcacctttaagagagacgagcgcctcgaattcccggttgtgggcaggccctttttcattgagaattttgtactcaagcgatccttttccgtcccgctgtacaaattcttgaagctggcttttgaaatccatcacatgagaaaaagcaccatcgtttattttagggaacacgtactctttcaggaattgctgaaccggctcaaggccctgatccagatacagtgcgccgataaacgcttcaaacacatccgctaaaagcgcaggacgctttctgccgcccgtcatttcttctccttttcccaagagaacaagatcgccgaatgacaattcgtgggcaagtgagacgagtgacggctcgcatacgatagcggctctcagcttcgtcaaatctccttcactcatggccggatatttggcaaataagaattgggagatcgtcagttccaaaacagcgtcacctaaaaattcaagcctttcgttgtcttcatacggctttttccgatgctcattcacataagatgaatgtgtaaatgcttgatacaaaagtttctcgttttgaaaatgaaccgaaatccgttcttggaactctttaaattgctctatttttttatagaacttttttttatctttaaaatgtgagtgttttgacatagtaacctccataggcacatcaggttcaccgcgctccccgccgtaaacggaatcagcagcgcgtacagcgtcagacgccggtaaccgaacgattaaagggctaaagccccgctgtcaggcgggacttttagcatcagcttattgctggttttgtatgtagttcacagcgtcgccgactgttgcaatcttttcagcatcttcgtcagaaatctccatatcaaactcgtcttcaagttccataacaagctcaactacatctagggaatcagcacctaagtcttccttgaaagaagcttcaagtttgacgtcagcttcatcaacgccaaggcggtctacgatgattttcgttacacgctctaatgtatctgccatagcaattcacctcccctcaagtattatagaggattcgtttttaaaaaactagagaaactaggatgaaattttaaaaacaaatctttacatcaccattccgccgtcaatatgaagggtttggcccgtcatataacgcgatccttcagaagcaaggaacgtaacaacgctgctgatatcggaaggatcaccgaaacgcgcgagcggaatctgcttcagcatttcatcttggacttctttagaaagcttgtccgtcatatccgtggaaataaagcccggagcaatggcattgaccgtaatatttcggctcgcaagctctttggctgatgacttcgttaagccgattacaccggcttttgccgccacatagtttgcctggccggggtttccgctgacgccgacgattgatgatacgttgataatccggccggagcgctgtttcatcatctgtcttgtaacggctttcgtgcagttgaatacaccttttaagttaatgttaatgacatcatcccattcattttctttcattctcatcagaagattgtcttttgtgatccccgcattgttcacgagaatgtcgattgaagaaaatgcagcgacagcctctttcatcatgttttgtacttcttcggaatttgatacatcggcttttacggcgatcgcgtttcggcccaaagatttgatctcatctacgacttcgttcgctttcgcttcattcccggagtagttgactactacattacagccgtttttcgcaagatcaagcgcgatcgcccgaccgattccgcgggacgctcccgttaccactgctgttttttcattaagcatcctgattctcctccttcagcgtttgaatcgccagttcgatggtttcatggtcagaaaccgagattgttttaaggcggcggttcacttttttcacaaggcctgaaagcacttttccgggcccgatttcaacaaacgtcgtgacgccttcgtcaatcagtttgttaatggtttcttcaaagcgaacaggcgaatacagctgttcgatcagttttttcttgatatcgtctttttccgtcataacgtcagccgaaacgtttgaaatcacgggaacagccgcattttttaactcacaggcgctgagcacctcctcgagtttttgcgctgccggcttcattaattcagaatggaacggtccgcttacttctaatgggatcgcccgttttgctccgttgtttttcgcttcctctgaagccagctccacgccttttgccgttccggaaatgacgatctggccggggcagttcagatttgcaagctgtacgagatgaccgttttccgtcacttgatccgtcacctttttcaaggactccgcatccattccgagaatcgctgccatggcgccttctccggccggcacggcttcattcatgaattctccccgttttcttaccgtgtaaacggcatctttaaatgtcatcgctcccgccgcaacaagcgccgaatattctccgaggctgtggccggcggtgaaatcaggggtgatgccggattctttaaacttttccaatacggcgatgctcgttgtcaacagcgcaggctgcgcattgtatgtaagggtcaattcttcggcgtcaccttcaaaaatgagcgagctcagctttgtttcaagcgtttcatccgcttcatcaaaaatacgttttgacgcttcttcgcgttcgtacaggtcttttcccatgccgatatattgtgatccctgtccgggaaataaaaatgcaatcttactcatgatgcggtaacctccagactactcatctgttttttcttcttttacttcttcttctataaatgcggccacgttttggctgaccatttctctcgcctggcgcagcgcatggtaaacagcgcgtgcgtcagaagagccgtgcgctttaatgacgggcgctttcaaaccgaaaagactcgccccgccgtactcagaatagtccattttcagtttcatttccatcagcttcggctttagcacgcccgctgcaagcttagaaacaaaacttgaagtcagtgtatctttcagcattttgaaaatcgataacgctgaaccttccaatgttttcaacgtgacgttgcccgtaaagccgtctgtgacgatgacgtcagcagcgccttcgagcaagtctctcgcctcaacgtttccgacaaaattcacgtttgtttcttttaataattcaaacgtcttttttgtcaggtcgtttcctttcttttcttccgtgccgacatttaacaatccgacgcggggcgagctgattccgagaacctgccgggcataaacagatcccataattccgtactggacgagatgctccggtttggcatcgacattggctcccacgtccaaaagaaggaaaccgtcgcctgaaacggtcggaagcgtcggcgcaagcgcaggccggtcgattcctttaattctgccgacgataaacagtcccgctgtcatgagtgcgcccgtattccccgctgagatgcaggcgtccgctctgttttcagccacttcctgcgccatcagcaccatagaagagtttttctttctgcgtacggcgcggaccggttcatccgtcggttcaatcacttcatcggcgtgcaacacagtgatgcggtctgatgttgttggcaagtgtgattctatcgttgtcttgtcaccgaccagcgtaatatgaagatcgtcaaatgcctcaatactcttcattactccgtcaataacagctttgggtgcgttgtcgcctcccattgcatctacagctattctcatgcatgctccacctttatgattgttttgaacggtacatgtcaaagctgccggagaacacgacttcttctcccacatagctgttgacttcaactaccgttctgcctttttctttttcgactgccgtcactttggctttcgcaacgacgcgctcgccttctttcacctgtcttgtaaagcggatatttgcgcttgcggtcagcgccagctcatcatcaatgacggctacggcgagtgagttcgcctgcgcaaacaaatgatgcccccgcgcaatttgattgcggctgaagacatgttcgcgtcttacttctaatatggaaatggcctggccgtcaagctccagatcaatgatttcaccgatcacttcgtctaaagacaatgatttcacttcatcatcaagcgtttgttctgccacgtttttaattctttccctcagctccggtattgagagctctaagcggtctaaacggatcgtctgaatgctgacgccgaatttccccgctaattcttcatctgtgatgaagggtgtcgatttgatcgtctgctgcaataatttttggcgttctttcttgcttcttctcatctgtaaacaccatccggacaattaagactaggtactaatagtagtatataatctcatagattggaatgcaatgattgttttttgaaagccgccgaattttacagaatcagcttaatttctccccttctaggacgccgcttgaaagtaattgaccgcgcagcatgcggtattcgtcatctttccaaaaagcctctgaagacaccagattggccgcatcctggcgggccgtttccaaagctctgtagtcatgaaccatatccgccaccttgaactcgggcataccgctctgtttttttccgaagaaatcaccggggccgcgcagttcaaggtccttttcagacagctcgaagccgtcgtttgtctctgacatgattctcatccgttccttcccggtttcggatttcggatcggccatcaagatgcagaaagattggtggtctccccgcccgacccggccgcggagctgatggagctgagataatccgaaacggtcggcgtcatagatgaccataatcgtcgcattcggcacgttcaccccgacttctacgacggttgttgacacaagtacctgacattgattggcgctgaattctctcatcacttgatctttttcatcagaatggagcttcccgtgcatcaggccgacattccatttaccgcggtaaacgtcagacagcatgttatatacgtcaatcgcattctgtacatccagtttatccgactcttcaatgagcgggcagataatataggcttgccttccctgcttcagctctttttctataaaagccaaaatccgctccagcatgtcgtgtttcacccaatacgtttcgatttgttttcgccccgcgggcatttcatctatcacggaaacatccatttctccgaagacggtaatggccaacgttctcggtatcggggtggctgtcataaacagcacatccggatcttgacctttattcttgagttttttgcgctgttcgaccccgaaccggtgctgctcgtccgtaataacaagactcagcgctttgaattccacttcatcctggattaaagcatgggtccctactaaaatatcaatctctccgagagcaagccgctccaaaagctccctgcgccgctttccttttacagaactcgtcaaaagcgcgatatttacatcttcatttgcaaacaacgatacgagagaatctgcatgctgttcggccagaatttcagtcggcaccattaatgccccctgatgccccgacagaatcgcagcgtacaaagcgatggcggcgacggccgttttccctgaaccgacatcaccttgcagcagacggttcattcggtaaggggatgtcatatcagcggtaatttcccgaagcacgcgcgtctgtgcggtcgtgagcgaaaacggcaggctgtctgtgaaagcggtgagcttttcagcaggaaacacatggctgatgccttttgactgttccctttccgctttacggaacgcctgcattttcagctgaaataataagaattcctcataaacaaaccgtcgtcttgcctgctgtaacgattccctcgtttcaggctgatgcatcgtctgcagggcatgtttgtaatcaggcagcttatagcggattctcaatttttcaggaagcggatcggccgcactgtccaaatgatgctgcagcgcttccttaataaaccgtctcatcatttttacggtgacgttttctttaacggaataaacaggctcaatgcttttatcttcttgatgaggaccgttttttaattcctgcacggaaacggtctgtctgtgtttatcccatttcccggatatcgtgacgacagaacctaacgtcagtttcttttttaagtagggacggttaaagcagaccgcggtaattaaataattgccgacaagcaccctgaatgtcagcctgtttcgttttttgccgtaataggtaagagaaggttctgaatgaaccttcccttctaccgtcactctttcttcatgttttacttcttctaaatccctcagctcatagtcgtcataacggtaagggaaataattcagaagatcagaaatgtcatagataccaagttcgtgcaatgttttttctgtttccggcccaatgcccttaatttccgctatactagtttgctgatggtgtgtcacttgatttcagcgctcctccgaaaatttttttctctaattctcttcccgtcggtgtcgcagctaaaccgccttgtcccgtttcacgcagtgctgtcggcattgtctggccgattttgtacatcgcgtcaatcacctcatcgcaaggaatgcggcttgtaatcccggccagcgccatatccgccgcgatcatcgcgttggatgctcccattgcgtttcgtttgacacacggcacttctaccaatccggcgaccgggtcacatacgagaccgagcatatttttcagtgtaatcgccattgcttccgctgattgctgaggcgttccgcccgccatttccacaatcgcggccgctgccatgcctgatgctgacccgacttccgcctgacagcctcctgccgctcctgaaatactcgcattatttgctacgacaaaaccgaacgcgccggctgtaaacagaaaacggatcatttgttctgtcgtagggttcagcttatgctttacggcgaataacgttcccggcacaaccccggcagagccggcggtcggtgtagcgcagatcgttcccatcgccgcattgacttcatttgtcgccacagctttagaaacggcgtctaaaatcagattgcccgaaaggcttcttcccgattggatgtatgcctgaagtttcacggcatctccgcctgttaaaccggtctgactcgtgacgcccttcagccctttttcaacagctgcttccatgacggagagattgcgctccattccttgaaagatttcttctcgtgttttttgcgtcacttccatctcttgggtgatcatcacttccgaaatcggaatttgtttttcttgagtgatttctattaattcttttacattacgaaacatgtcattttcctcctgactttttagtcagctatcttagtaacctgtataatattaggaagtgttgaaagctcgtcaagcacttcttcttcaatattctgatcgacctcaatcgtcatcagcgcaagctggccgacgtccttacgcgccacttccatatgtccgacgttgatggagaatttcgcaagcacattggcaacgcctgcaatcgtgccgaatttatcattgtgaacgactaaaatagccgggtggtttccggaaagtcgcagctcaaagccgttaagctccgtgatttctatttttccgccgccgatggaaataccggtaagggcaagctctccctcatcatcagaaatgacgatacgcgccgtattcggatgaacgggcacggcatcctctgtacggaactctacatatatgcccttctcttccgcaatttgaatcgctgttttaatccgttcatcaaatgtatcaaaatcaagcaggccgccgataatcgcgacatcagtgccgtgacccttatacgtttctgcaaatgatccgtaaaaagacacaacgatccggcggggctcacgcctgaataagcttctggccactctgccgatccgggcggcgcctgcggtatgtgaactggacggaccgatcatgaccgggccgataatatcaaaaacgcttctatacttcatgctggtttgctcctccttaacatcacttcattcagcgcttttctttagactaattgaacatttctcaattggcaagcaggcacactgccgcactgccgcaggtaaataaaggcataagaatagaagggcctgataagcccttctattctgccgcaaatatatatggatacagaggctgtctgccgttatggatttcaacctcgatatcttcacagacgctagcaatatactcagcgagtttctcagcttcttcttccggcgcgtcctctccgtacaggatggtgacgatttcatcttcttccccgatcatttcatccagcagcaatttcgccgcacttatccgatcttcggcgctgccgataattgaactgtttaaaatgccgataaaatcaccttttttaatttctttgccgtcaatatgggtgtctctgactgaatatgtcacctgtccgcttttcacattccggatggcctcaagcatattggcttcatttacatcagccggctggtcagggttaaacgcaagcagggcggtcatgccttgagggaccgtttttgccggaatgacaatgacattttcttcagctacgctcgccgcctgattggcagccatcacaatattggaattgttcggaagaatgaaaaccgtctccgcattgacagactgaacggcttcaacaatatcttccgtgctcggattcattgtctggccgccttcgattacgtgtgaagcgccgatgctcgtaaacaattcagaaatgccctctcccattgccacagtcacgatgccaaaaggcttgcgggcttctttcataacgccggccggctttttttcatcatgttcttggctgatgattgaagtatgctgttccctcatgttttcaattttaattttaatcagatcgccgtaacgctgtgcgagattgagtacgttcccaggttcttcggcatgaatatgaactttcgccagcgtatcatcagccacgaccagcaatgaatcgccgaaacggctcagttcgtttctgaacgcctcttccttgaacgtccgtttatcttgatccagcctcaccattacttccgtacaaaatccgaattcaatgtcttctgtactcagcatgctctgcgcgcttttatgatgctcggcattcaccatatcatcgagtgccggaagaaccgcttttttcggtacggcctctccttttaaagcagccaaaaagccttcatatacacaaagcagaccttttccgccgctgtcaacgacaccgacgtcctttaaaacaggaagcagatccggcgtgcggttgagcgacgcttccgcttcttcaataacggcctccatgactgaaataatatcggtttcttctttggccgaggcgaccgcttttttagccgcatccttggccacggttaaaatcgttccttcaaccggtttcataaccgccttatatgccatatccactcccgcttggagtgctgcggcaaactcttgggcatcaatttggtttttgttttcaatgctctttgtgaaacctctgaacaattgggacaagatcacccctgagtttcctctcgctcccataagcaggccttttgacagggcgatgccgactttgccgatgtcgggtgagtcaatgtgctctacctctcttgcaccggatgacatcgataaattcatatttgttccggtatcgccgtcaggcacgggaaacacgttcagcgcatccaccgcggatgcgttttgagacaatgtctcagccccgccagaatcattgccgcaaaagctctcccatctaagtttcgtctagacaatactcatcctcctcactacgggttcgttactcgtacgccttggacataaatatttacagaatcaactgcaagtccgattgtttgatttactgtgtattttaccttcgtctgaacattgtgggctacttcggatattttagtgccgtagctgacaataatgtacatgtcgatatgtatttgttcggcttcctgacggacatgtacgccttttgcgaagttctctctccggaggatttcagacaaaccgtctttaatctggttttttgaggccatccccactattccgtaacagtcaatggcagcgcctccggcaaccattgcgatgacttcgttggatatatcaatctgtccgtattttgtcttcatttcaatggacacacaggttcctccttcaggtgcatagagttatcattattctactatatgtatcccattatgaaaagaaaagatacagacagcggccttcagcgcggaaatgtgattggttttacatgtcaagtgatttttcttgaaagtaagggaaacaatagttgcaaacggtttttagctgtggtaaattatttaaagtattgtataacgaaagcatctgagacactatgtttaaaaagatgtttcgcgcagttaggagggaaacaaatggcacgtaaatgttttattacaggtaaaaaaacaaaagccggaaacaaccgttctcacgcaatgaacgcttctaagcgtacttggggcgccaaccttcaaaaggtccgcatcctcgttgacggcaaacctaaaaaagtgtatgtatctgcccgggctttaaaatccggtaaagttgagcgtgtataagcaaaaatgaacgcctgcccttttatgcggcaggcgttttttatgcgttcaaagagggcgatttcagcttcttgggcttactcttttctaaatgagcccagcatcgcccggacaattcctcctaaaaacttcggcaatttaatggtataaaatttcattttgtcccctcctataagtcccgtatccgctgcgttcatcactttaggattcatggttttttccgcatatggcagaagccgcttttctaatccgcgctccttaccattattaatatgccttttgcaaacgaaaaagtacctcgtgaatgaatgagttcgttactaatacatagtgtggaacccagaggaatatgacaattatcaaggggatatttaaaaccgtcgagtgtcaggccgtctgccgcttccgtaaacggaatgaaagaaatatagcgtctgcgcgctttttcttcaattgtataacggccgggcccgaacatctgaatgtcattctgccggtcgatcagcttgacatcggtatgcttatgtaaggctttatacagcagctggatgttccctaaaaagtgatcggctcttccgcccgtcacaccgaatacccgaatgttttccggttctttttgtaaagcccagtcaagggcgagttcaagatcggtataatctttttccgcctgatacacatggagggccggcgccgctttttgaatctgcatgagctcctcttccgtaatgctgtcaaaatcaccgaaagcttcctgcggaatgattccggcctccaaaagagcaaccgtccctttatcaactccgacccacgtcgtatctccgtctgtgtattcggatagatcgggaataagctcccgcgggccgcccgcaacgatattgattgtcttcatatgctatcctctctcttagacgcgaaaagagccggcggctttcaccgggctctttttcagcatgtttatgatgcgtttcggatgtcagcgatggcttttttccgatccggctgattatatacggcagacccggcaacaagcagattggcgcccgcttcagcgcataaaggggctgtttctttattaacgcctccgtccacctcgattaaaagctcagacaggcctttctcctcagccagctgtttgacctgacggattttcggcagaaccgaatgaatgaagcgctgtccgccaaaaccggggttaaccgtcattaacagcacaaggtcaagctcctcgatcacatgttcaatcatttggacgggcgtatgcggattaagcacaactcccgcttttaccccctgctcttttatcaattgaatggtccggtgaagatgcggacacgcttcagcgtgaacggaaaggatgtccgcaccggcttttgcgaatgccgggatgtagcggtccgggttttcaatcataagatggacatccagcggcagatcagtcaccggacggacggcttcaacgataagcggcccgattgtaatgttagggacgaaatggccatccatgacatcaatatggatatagtccgcccctcctttttccacgtctttaatttcctcgcccagtgaagcaaaatcggcggaaagaattgatggcgcaaccttaatcatattaatacctcggctttctctcttttatttcctgcataaattctttgtaatgctcgtagcggtacggctgaatctctccttcttccaccgcttgctttaccgcgcatttcggctccttaagatgcagacagcctctgaatttgcaggaggcgcttatttctctgatctcagggaacgtgctgcccagctcttcttcctcaatgccggtaaattcaagcgaactgaaccccggagtatccgcaaccagaccgcctgatgtatgaatgagctccacatggcgcgtcgtatgttttccgcgtcccaaatgcgcggaaatctcgtttgttttcagctcaagctccgggctgatcgcatttaaaagcgaagattttccgactccggactgaccggcaaacaccgtcgttttgtcctcgaagtgtttcacaatgcctgttaagccgctgttttcttttgatgacgtcacatatacgtcataaccgatcgcctgatagtctttcacgtaagaaagtatcgcctctttcgattccccgtctgcagctaagtccattttggttatgcagatgatcgggtgaatgccgttggcttccacaaggacgagaaaacggtccaataaagacgtgctgaacgccggctgaacggcagaaaagacgagaacggcctgatcgacatttgaaatcggcggcctgatgagctcatttgttcgttctttgatttccagcaggtagccttctttatcattttcagcctgataaacggcataatcgccgaccaggggcgttattttattttttctgaaaatgccccggcctctgcattgaatgatcttgtcctgtgattcatccaagacataatagaatccgcttaacgcttttataattttgccctcaggcatagggtccctccttatcagtcattatctttcgggtattcaatcgttttgtagctgacgactttatgatcgaccatcacttgataataccccttctgtccctgatcaatcttcagttcaattgttttttcggtcggctcttttattttaaatgagtcatacgtatcagagatgctgtggtccttatcatcgatggcgatttgcacttcaagctcttccccttcatgttcgggttcgtaaggaatgctgattttttcttttaccgttttcgccggtttttcttcaggtccgagcgagaacgtcacttcaacattacttcccggcttaaccgcagtgccggctgacggctcttgtttcatgacttgtccttccggcacgtcatctgaatgggcttgtttttcaacaagctgcaggccgttatcttcaagataccctgaagccgcttctttgctgtaagtctttaagtccctcagcgtaacgtccgccgggccgaggctgaccgttagattgacttcatcatcgcttgcgaccatatcggtgccggctgacgggtcctgatcaattacggtgccggcctcgctgtcatcgttttcttctttgacattgacatgtttgaaacctttttccttcagcgctttttttgcgtcgccgatctgccgtcctttcacgtcgatcagctgggttttcggttttccgatgcttttgtacagttttacagaagagccttctttaacggtagaccccgcttttgggtccgttttgaccattaattcctcttctattttttcatcttcaatatccgttatatcaggatcagcccggagcccgttcttttcaagcagggcttccgctttttcgtacttcatgccccgtacgtcggggacgcttacatctttaggcataaataaagacgggaacacggtgaccgcaagaacagccgccataataaaaatgaaacagacggccagcaaaacccacggccatttccgttttttctttttggctggctgctgttccttatcatccgtctcccccggcgtttccgcctgagacgcggcttttgggccgtcagtaataacgggaatggcttttgtcatttcctcatcatcctgcacggaaaatttttgttcattcagcctgccggcgtcaaaagccgttctgatgtccgcctccatgtcctcggcgctttcatagcggtgaaacgggtctttggcggttgcctttaaaataatgttttcaacgctctgcggaatggaagggttccactttctggcggaaggcgtttctgtttgcaggtgctttagcgctatgctgacggctgattctccgtcaaaagggattttgcctgttaaaagctcaaacagcacgatgccgagcgcgtaaatatctgattttttcgttgccagaccgcctctcgcctgctccggagacaaataatgaaccgagcccagcacagaattcgtatgtgtgattgtcgtagacgtaagcgctgtggcgatgccgaaatccgtcaccttgatatgccctaaatgatctatcaatatattgtgcggtttaatatcccggtgcacgatatggttttgatgggcatgggcgatggccgagacgatctgctccataacggacagcgcttctttcggatgaagcggtccgtgtgcgtttatgtattcctttaatgtcatgccttccacatattccatgacaatgtaataaatatcgccttcctccccgatatcgtaaatactgacgatattcggatgatcgaggcttgatgccgactgtgcttctcttctgaaacgcctgataaaatcaatgtcattcacaaagtcaaaccgcagaattttaattgcgacttcacgttcgagaatgatgtcctcagctaaaaaaacgtttgccattccgccgccgccaatgggccggaggatatgataacgcccgctgatccgcttgccggttagcacttgtcttcaccctcttttgcatctgcggaaaactcaatcaacacagccgtgatgttatcttcgccgccgttttgatttgctttgctgatgagaaggtctactttttcctgatgatcagattcggcttgaagcatttgtttgatctcgtgatcttctattttatttgacagtccgtcagagcataaaagcagctgatcgccgtcagacagttcaaaagaacgggcgtcggggctgatggtttcatctgtccccagcgctctcgtcaatacatttttccgcggatggtgctcggcgtcctctttcgaaatctcccccgtcttgaccagctcattcacaagcgaatggtcctcagtcagctgagtgaattccccctcttgaagcaggtagcaccggctgtcaccaatatgagccacagtgacaaacttccccgtgaataaggcgcagacaatggtggtgcccattccccggcattcttcattggctttagcgtggtcatgcactttgacattcgcctcatgaatccggtctttcagccaatcctcgcaagcggacggcagagaaggaaccgtttcggtccggttccactgctcttccatcgccgcaaccgccatcctgctcgctacatctccggcaagatgaccgcccatgccgtcggcgacaaccgcaagcaccgcgtcttcttttgtgaaaatgcccgccgcatcttcattatgccggcggactttacctgtatctgttttcaaggctgtaatcaacctcttcacctcgtctcgtcttgacgctccttcgcgcgaagctgaccgcaggccgcgtcaatgtcatggccttgctctcttctgatcgtgacatttacaccgcgggattttaacgttttttcgaatgcgaaaatctgatctctcggtgtgcggacgtaatcccgttcaggcacatagtttaccggaattaaattgacatggcatttcacgtcttttaacagttctgcaagctcttctgcatgttcgacctgatcatttacgccgccgaacagcccgtattcaaagctgatccgtctgcctgttttctcgatgtaatatttgacggcctccataaggtcaggaagcttataggctttgttaatcggcatcagacggcttctgatttccgtattcggagcatgcagagaaatcgcgaaattgatctgcattttttgatcggcgaaatcgtaaatcttcggaatgattccgctggtggaaactgtgatatgacgcgctccgatgttcagccctttatcgtggttaatgatttttaagaaagcgagcatttcattgaaattatcaaacggctctccgattcccatgatgacgactgagctgacgcgttcatccgtttcatcaagcgccttttgcactttcacgacttgagcgacgatttctcccgcttcaagattccgtttcagaccgccgagcgttgacgcgcaaaatgtgcagccgatccggcagccgacctgtgtcgttacacatacagaattaccatactcgtgtctcattaaaaccgtttcaatcgtataaccgtcatgaagctcaaataaaaatttcatcgtgccgtcttgagatgtctgttttacagccgttttcagcgttgtcagcacaaaattgctctcgagtttttcacgcaggctttttgagaggttcgtcatttcatcaaatgaagaaacccgcttttcatagagccattcaaaaatctgtgctgcgcggaacggcttttcgccattctcggtcagccattgtttgatttcatctaattcaaaagagtaaatggacggctgctcagtccgcagctctttccgtacgcttgtcttttttaattgtgtcatttttatcccttctttctcatgctgctaataaagaaaccgtctgttccgaaataatgcggaagaatttgaaggcttccatcctgaacaaagggtctcgccttttcaggcagccgcttttcaagagacaaatcgggttcaaactcagggtgttcttgtataaacgcatgcataacttcttcattttctgtccgatccattgtacacgtactgtatacgagtgtgccacctttttttactaatggggcgatttcccttaaaatgccgagctggatttctgacagccgtctgctgtcctccggcgtcttcgtatatttcatatcgggttttcttctgatgacgccgaaacctgagcaaggggcatcaacgagaatacggtcaaaccgttctgcgccaaaggcctctcccgcttttcgcgcatccatcgtttgcgcgtcgatgatcgtaagaccgagccgttctgcgccctctttaatcagcttcactttatgacggtgaagatcaagcgatgtgaggctcccctcgttctccatcagttccgcaatgtgagccgactttccgcccggtgcggcgcatgcatctaaaacggtttcgcccggcttcgggtccagcgcccgggcgacaagcattgagctttcatcctgtatggatacccggccgttttggaaaaatgccgtgttcgcgatgcttcctttcaaaagcttaatcgcatcaggagaaaggtctccggcttccgcttccagaccggcattctccatctcattcagcaccgtttccctgtcgctctttatgtgattgacacggagcgtctgcttcggcggaatgagatgaatccggcagattttttcagccgcctcaaagccgtacgcctcgacccactcttttacgagccattcgggatggcttgtctctgtagaaagacggagaaccgggtcttcaatttcagcaaatgacggcgccccctcacgctgcagggagcggagaatgccgttgacaaaggacgcaatgcccttatgcccgcgttttttggcgatttcaaccgcttcatggatggcggcgcgatccggaattttttctaaatactccatttgatacgcggacagacgaagcagctgaatcacccacggcttcaccttattcggcttgcggataaaaggcttcagcatatagtctaaggcgattttattttgcagcgttccgtagacaagctctgtcagcagtcctctgtcctgatcgctgagcgtgttcgttttgataaccgatgtaagaagcaggttgctgtatgcctgattttgctcaagcttctcaagcgcttcaagggcgagctcccggacattaattttcttcatttgctgctcctaacacgtcaccgggctgcacatttttgcctcttacaaaatcttcgcccttcatccgttttttccccgccggctgcagctcagtgattaaaagggcggtgctgtttcctgatgcgacgacaatgccgttttgctccgtgcggatgactgttccgggcgcagcatcagtttttgccgcaactttttcagaagcccatactttaatagtttgaccgttcaaagttgtataggcgacaggccaagggtttaaacctctgatctggttgtagatctcttctccgggctttgcccaatcaatccgctcctgctcacgcttaatgttaggcgcgtaagtcgcttttgattcgtcctgtttgatcggtttaatatttccggagatgacgttcgggacggtctctgacaaaagctttgcccccgctatgcttaatttgtcgtgcagcgtgccgacgttatccgtttcatgaatttccacttcgattttagaaatcatatcgcccgcatcaagcttttcaaccatatacatgatcgtcacgcctgttttcttcttgccttggagaatcgaataatgtatcggcgctccgcctcttaattcaggcaatagtgacgcgtgtacgttgatacagccgtatttcggaccgtccagcagctgcttgggcaggatctgtccgaatgccgccgtaacaatcaggtccggcttcaggcttagcactttttctatttcttcttcgagccttactttttcgggctgaagcacgggaatgccgtgacgttcagcttcagcctttacaggagggggcgtcatgattttttttctgcctttcgggcggtcaggctgcgtaacgacaccaaccacttcatatccgtcttcaataagcgtgcgcaggacgggaactgaaaagtcgggcgttcccataaaaacgatccttgtcatccaatcatccttccatttctgccagttcttcttcagtgtagtaagccgtaatttttgatgtgaataaaatgccgtctaaatgatccatttcatgctgaacggctctggccaaaaaaccctccgcttctaaaataaacggttttcctttacggtcgtgggcttttacctttacgtaatccgggcgggtgacatcaccgaaaaccccgggaaaacttaagcagccctcgactccggtctgttcaccgctcttttcaagaataaccggatttacaaggtcgatccggccgctttcttcaccgatgtccacgacggccgctctttttaaaatgccgatttgcggcgcggcgagaccgacgccatccatttcgagcatcgtatcgtacatatcgtcaagcagtttttttaattttttatcaaacactgtcacttcatcggcgggtgtttccagaacctccgccgggtgtgtgacgattttttttacagccaaaattttgccctccaaaaactaatgttacatcagcatgtacggattcatatcaattgaaatcattacatgcttttgcgcaatgtcgcgtttatagtgctccagtatctttttcaactgaatctgcaactcgttttcctgtctgtattttatcacgcattgatagcgatatctatctttgatcctggcaatcggggaagccgccggcccgagaattttcgtatcaggcccgcatcccgctcttaaatagtttgtaatcttttctgcggtgaccgcggcttttgccgcttcttcatgagaaacggtcaccagcgccacgtaataatacggcgggtatgactgggcccgtctgtgcgccatttcctgctgaaaaaaagtttcatagtcgtgcgttttcgtcagctgaatgctgtaatgagacggtgtatacgtttgaatgaccaccgttcccggcttttcatgccgcccggcccgtccgcttacctgtgtcagcagctggaatgtcttctccgcggccctgaaatctgggatgtgaagcgtcgtatcggcgcttaatactccgacaagcgtcacgttcggaaaatcaagcccttttgcgatcatctgcgtaccgagcaggatatccgccttcccttcaccgaacgctgacaacagtttttcatgggcgccttttcttgaagtggtgtccacatccatcctgatcacgcgcgcctgaggcagcactttggtaagctcctcctccacacgctgtgttcccgtgccgaaaaagcggatatgttcgcttccgcattccgggcatgttcccgggacaggttcctcatggccgcagtaatggcatttcagcctttgtccgtagcggtgataagtcatggaaatgtcgcaatgcggacattgcggcacataaccgcagtcccggcacatcacaaacgaggaatacccccgtttattcagaaaaaggacggcctgctctttttttgcaagcttctcttccagctgttccatcagctctcttgagaacattgatctgttgccgtttctcagttcttctctcatatcaacgagagaaacgtcaggcatgagctggcggtttacgcgatgttttaacggaagcagctcataaacgccttttttcgcccgcgcaaatgactccaatgtcggcgtggcgctcccgaggacgaccggacagctgtgatgctcggcccggcggatggctacgtccttcgcatgatatcgcggcatttcctcctgcttataggaagattcgtgctcttcatcaataatgatcatgccgagattttcaaacggggcaaagatggccgatctggctccgacgacaagccggacttccttgcgctgaatcttccgccattcatcgtatttttcacctgtggataatccgctgtgcatgaccgcaacctgtgagccgaagcggcctttaaaacggttgaccatttgcggtgtcaacgaaatttccggaacgagcacgatggcttcttgtccttttgccagcactttttcaatggattgcaggtaaatttccgttttgccgcttcccgtgacgccgtgaagcagaaagacgtgatggacatggtcggctacagcttgtttaatcggctcaaaagcggcctgctgctcttctgtaagagagagcggctctgtttttttgaacattctgtcctgataaggatcgcggtaaacctcctcaaagctttccgtaagaagcccctttttaagaagcgttttcagcgtcgcggaactggaatcggtctttttgcaaagttcagccgcggaaatcttttctcccccgccgataaaataagtaagcacggcgagctgtttagaagcctgctttgtcaatgaatctgcgtgccgggcgagttcttctttgtctgcccccgcttcaatcatgcggatcatttttttattcgttttttgggcgactttatatgtgacatcaatgcttcctttacgcacgaatttctgaagtgacgaaagaatgctttcatcggtaatatccgagtacagaagacttttttgattcctgaaaagctgtttgatgtccggtgtcagcgcttcttcgtcaacgactttcagctctttctcgtacttcgccttcaatgcggcgggcagcattgcctgaagcgccgtgattttaaacgacagcgttttgtcagaaagccatgaagacagctgcatcagttcctcagtcagaacaggcgtcaaatcaagaagcttctcgacttccttcattgagccgccgtttaattcggacgaatctttcaaaccggtcacaaatccttgaagcttgcgcgggccaaacgggacaatcacccgcatgccgacttcgatcatcccttttaaatgatcgggaattttgtaatcaaagggtctgtcaatgtttttggagctgacatcgacaatgacttctgctacattcatacgggttttcggtcctcggctttcaaagctgtcatttccttcagcatttcaaaggaaacgtcaagtttagacataagcgcaagctcccgttttcttccgtcccggaaatagaaggtgacgacattcgtatccgtgccaaatccggccccttccgctttcacatcattcgcaacgatcatatcaaggtttttctgttcgagttttctgcgcgcatagcgttcgacgtcttgcgtttcagccgcaaatccgaccagcagctggtgtgttttccgttcgccgagttctttcagtatgtctgccgtacggttgaattcgatcacgagcgaaccgtctttcttcttcattttgtgatcagaaacagccgccggcgtaaaatcggccacggccgccgtcttaatcaccatgtcgcatgaatcaaacacagaaagcacggcttctctcatatcggctgccgattgcacaggaagaaactgatacagcccgactggcggctctattgacaccgggcctgaaatcagcgtcacccgcgccccgagacggacggcggcttcagcagcagcgtagcccattttgccggtggatttatttgtgaagaagcggacagggtccacggcttcgcgcgtcggaccggccgtaatgacaatatgttttcctttcagcggcgcatcgtcttcaggctccttaaaatgctctctgacacgctcaacaataagctccggctcctccagccttcctttgccgacatatccgcatgccaaatagccttcactcggctcgataaagcggaccccgtcctgataaagcacagagatgttccgtttcaccgccggatgatcatacatatggacattcatcgcaggcgccacccagaccggggcctcagccgccagcaccgtcgttgtgagcatatcatcagcaattccgttggcaagcttgccgataatatttgccgtagcgggcgcgacaataattaaatccgcccagtcagcggcatcaatatgagaaatcaccttcggattttgttcattaaatgtatctgtatacacttcattccggctcagcgcctgaaatgtcagcggagaaacaaactcacgcgcggactcagtcataatcactttgacatttgcgccggcctgaaccagcttgctcgtgagtgcggaagctttataaacggcaattcccccgcttacgcatagcaaaatgtttcggtttttcatgaagtcttctcctcctttatgaaagcattggacaaatcccaaacggaaaaaaataacaacctatgtagagataggttgctacgtgtgcttgttattcgctgtcttctctttcaaacgaaagcaggcccgcgtcaatttcttctaaagctttgcctacatatttgtgagaaatggtatgttcaatctgctggtcctttttgatctgcatttcacgcgcgcgtcttgcagacacagtcaccagcgtatatttagaatctaatttattcattaaagagtcaattgacggatctaacataagttattctacctccagcattttcttatatctcggagcaacgcgttcacgttttaagtgctcggcgagaacgattgcgttaatcttatcacaagccgtttggatatcgtcgttttcaacgacataatcatacgcgtccatcatttcgatttcagcttttgcggcattcattctgttttcgattaaatcgtcggtttcagtccctcttgtcacgattctgtttttcagctcagaaagactcggcggcgctaagaagataaacaggccttccggaaatgcattccgcacttggagcgcgccctgcacttcaatctctaagaagacgtcttttccttcttgaagcgtctgttcgacataatcaacgggcgtaccgtaatagttgccgacatattctgcccactcaagcagtttgttgttttcaatcatgcgctcgaattcatctctggatttaaagaaataatcgacgccgtcgacctcgccctctctcgggtttctcgtcgtgactgaaattgagtattcaaatttcgtgtcctgttgtgaaaatattgcttgccgaaccgttccttttccaactccggagggacctgagagaacgattaataaccctctttctttcatgcggcaattacccctgcccttcatccataatttcttctttcacagaaagtctgtgtgcaactgtctcaggctggacggcagataagataatgtgatcactatccatgacgacaactgcacgggttcttcgtccgtatgtagcgtctattagcattccgcggtctcttgcatcctggatcattcgctttattggcgcagactccgggctgacaatcgaaatcatccgattggcggagatgatattgccaaatccgatattaatcagtttaatcgtcatcttctacgttccccctgtaaaatagacgtctctagtgtaacctgaagagaccgtctgtaaacaatacgcacagtcgctattctatattttgcacttgttccttcaatttttcaatagaacttttcatttcaacgacaagctttgtgatttgatgatcattggcttttgagccgatcgtgttcgcttcccggttaagctcctgaacaaggaaatcaagtttgcggccgactgccccgccttcttttaatatatcacggaattgaacaaaatggctcttcaatctggtaatttcttccgttatatcagaacgatcggcgaaaatggcgcattccgtgatcagcctgctttcgtcgagcgcgtcctccgtccattccttcattcgggcgtaaagacgctcgcggtattgaataacaacggccgaagcgcgctctttcacctgttcggacagcgtctcaagccgctcaatgtgcagaaagcagtcttccgccaaaagccggccttctttttccctcatgtcacaaagttcctttacagccagctcagcggcttccctgatgacttcttcaagcttgtcatcacgcatctgttcttcgtgaatctgcgcaatatgttcaaatctaaagaaatccattgcatcgggttctgcggccaggctgtagcgctctttcatggcgcgtgcggcgctcacatattcatcaaggagctcccaatcgatgttcaggcttctttttatgagcgcgtcactgttgacagtgagaaacagctctactcttccgcgctgtatatgctgcaatatcgtttgtttcagcttatcctctacatatagcaaaggccgtggcaggcgggcgttcacttctttgaaccggtaattgacggatttcaattcaacggttgccgagagatcgccttttgtgctgcttgcgctgccgaagcctgtcatactccgtatcatatgaaacacccaattctttcccgttatcaaaataaaagggcaatagacatgctattacccctaagattatatcatatggaattatttttttcttgtcaaaagtgaacccgccagcaaaaaagtaggtatgccagacatcccgataatcagcatccaatcgcccggcgtaatcggcactgttttgaaaatcggctgcagcggcggataatagatgacgatggccatcaggaagacagaagaaacgatggcgccgagcagataaatattttcaaacggattccgggagaaaacagacgtttcgctccggcagtcaaacacgtgtataagctgagccaggacaagagtcgcgaatgcaacggtctgtgcgtagggcagattttcaggattgcggtgatagacgatgataaacgctaaaatggttgcggctccgattaaaaaccctcttgatacgactttccagcccagttttctcgcaaacactccttctttcggatgccgcggcttccgcctcatcaggtctccttccggctgatccataccgagggccatcgccggcagcccgtcagtgactaagttcacccacaatatctgaatcgggacgagcggcagcggcagagcgagaagcatcgcaaacagcatcactaaaatttcaccgacgttggaggccagcaaataccggacgaattttcttatattttcatagatattccgtccctcttttatggctgatttaatcgtagcaaagttatcatctaccagaatgagagaagaggcttcctttgccacatccgttcccgtcacgcccatggcaacaccgatatctgcctgctttatggccggcgcgtcattaaccccgtctcccgtcatggcgacgacgtgtccgttttcctggaacgctttgacgattttcaatttatgttcaggtgacacgcgtgcgaagacgtagacatcatcgaccgtttcgataagttctttgtccgtaagctcattcagcgtcttgccgtccatcacacgcccctttttcggaagaagacgcaaatcttttgcaatggcctttgccgtttcgacgtgatcccctgtgatcataaccgttttaatgccggcttcacggcattctttaatggcctgtctgacctccggacggggcggatcaatcatgcctgacaagccgagcatcgtcagatttttttccgcctgctccattgtcggcttttctccgggcttaagcggtttataagcaatcgcaatcgtacgcaaagcttgcgacgccagctctttcagaaccgcttccgtttctgctttcttttctcctgaaaaaggcgtacttcttgcgccgtgcatcagatgtgacgagcggtcaatcagcacatcgggcgctcctttagtgatgacgaactgctttttttcctgatcctctacaatgacggtcatcattttgcggacggagtcaaacggaaactcggcaaccacgcggtaatgcccgctgagccaatcgtttgaatagccgccctttcttgcagccgtcagcagcgctccttctgtcggatcaccgtcgagtacataacggccgtctttcagtgcgatttcagatgtgttgcacaacgcgccgaaaaccagcatctgttcaagaatcttctcatctttcggcttgatttcccgctcatctcgggtgaaaacgccctccggcacatagccgatgcctgacactttataaattttgccgcctgaccacatatgggtgacggtcattttgttttgtgtcagcgtgccggttttatcagaacaaatgacagaggcgcagcccaatgtttcaaccgccgggagctttctgacaattgatttttgtttgatcatgcgctggacgccgattgataatgccaccgtaacaatggcgggaagcccttccggaattgcggcgacggccaatgacaccccggccaaaaacatgctgtaaagatcatgtccctgtaagacgccgactgcaacgaccaataccgttaaaaggagcgcgacgataattaaaattttgccgagctcttcaagtcttcgctgcagcggtgttgaaaggctgccggcggattccagcatatcggcaattttccccattgccgtattcattcctgtaccgacgacgacgccgacaccgctgccgcgcgttacgatcgtacccataaacgccatattgctgatgtcgcctaacgaaacatccggctttctcaatttatcggcttgtttaaccaccggaattgattccccggtcagcgccgattcctcaatttcaaggcttttcgcttcaacgatccgcacatccgcgccaatccggtcgccgcttgaaaatttcatgatatcgccgggaacgagctccttggactgaattttcttccagctcccgtcccgcaacgctgacacatacggcgttgacagctcttttaatgcatgtaaagacttttccgcccgccgctcttgaaaaaaaccgagaaccccattgacaaatacaatcgccataatcgctacggcatctacatattcgcctaaaaacccggatattaaggttgccgccagcagcacgagcaccataaaatctttaaattgggcgaaaaacacggcgatcgccggtgtcctcttgccctcctgaagctcgttcggcccgtgcttttcaaggcgttttttcacctctttttcggtcaacccctgtttaatggacgtatttgttgctttcagcaaatcggtttgtcccatttcatgaaacttcattcttctcgtccactcccctgcctcgctttagagatgtcactctgtaaacaagcttattctgactcgtcccttttcatgctataattatcgaatgcaggaagaaggaaagggtgttttatatgtcttttgatggcatgtttacatacggaatgacacatgaattaaacagccggatcgccggaggacggatcacgagagtccatcagccttttaagcacgatgtgatattccatatccgcgccaacggaacaaaccacaaattattattgtcggcgcatccgagctattcacgggtgcacatgacaaaccaggcctatgaaaatccgagcgagccgccgatgttttgtatgctgctcagaaagcatatagaaggcggatttattgagaaaatagaacaggccggattagaccggattatgatattccgcataaaaagcagaaatgaaatcggcgacgaaaccgtaagaacgctgtatgttgaaattatgggacggcacagcaatattattctgactgacggagaaggatccatcatcgacgggctgaagcatttatctccgtcgatgaacagctaccggaccgttctgccgggctatgattacaagcttcctcccgctcaggaaaaaatttcgccgcttgccgcggatgaagaggacgttttgcgttatctcagttttcaggaaggacggcttgaccagcagatcgtcagacatttctccggtgtttctccgctgtttgcaaaagaagccgtgcacagagcgggtctcgctaacaaaataacgctgccgaagacgctgattgaaatgttccatgccgtgaaagattgcaggtttacaccgaacattacgacagccggcggaaaggaatacttttatctcctgtctctcacacatgtaaacggagaggagcgcacctttcactcactgagtgagctgttggaccggttttatttcggcaaagcggaacgcgaccgcgtcaaacagcaggctcaggatctcgagcgttttgtcgcaaatgaacggaaaaagaatgccaataagataaaaaagctggaaaagacgctcgactactcagaaaatgcgaaggaattccagctatacggcgaactgctgacggcaaatttgtatatgctgaaaaaaggtgacaaagaagcggaagtcatcaattattatgatgaagaaagtaagacggtgaccatccctttaaatccgaacaaaacaccgtcagaaaacgcgcagatgtattttacaaagtatcaaaaggcgaagaattccgtcgaggtggtaaaagaacagatccgtctggccgaggaggaaatcgcttatttcgatcagctgatccagcagctctcctccgcctccacaaaggatattcacgaaataagggaagagcttgtggaaggcaaatatctgcggccgaaacagcagagaggacagaaaaaacagaagcagcacgttcctgttttggagcaatatgaatcttcacggggattgacgattcttgtcggcaaaaacaataaacaaaatgagtacttaacgacaaaagctgccgcgagggatgatttatggttccacacgaaagacattccgggttcccacgttgtgattaaaagcagcgatccggatgaacaatccatactggaggcggctgcgatcgccgcttatttttccaaagcgaaagattccggctccgttccggttgattatacaaaaatcagacatgtgaaaaagccaaacggcgcaaagcccggatttgtcacctatgacagccagcataccgtatttgtcacacctgatgccgaccttgtcatacggctgaaaaaataaacgcacctccaagctgaaacccgcactcggcttggaagtgttttttattacgtataaacggagacgaaactctcccagccgtcagaaccgatctttacagtatctgatcagtttcccgtcatgtctgcatgatccgccgggccgtctgtgatttaaacggtcacacctgatttggcggcggatactttcaccttccctcgccgaacctgagcacatccgggcgggtctctgacctttcctttgtatgcgggcgaaatccaggcggcatcgggatcacatacatattccgcatcacttcgcaatcctgaccgcttgtcggcatataccattcaaactgcccgctttcgttttgaatttttcacattcggcggactgtcaggacagtataaaaaacaccctgcctgatgacagacagggtgttttttatggtcttcttcttttctcaaataatcgatccacttcttcagccaaatcagcagtaatgagaggctttatgtcctcagccagtcttttcgtatgtgcagggcttgcgccgcttgttgatacggatacttgaatgcgccctttgcggatgatcttcggcatatacacgctgccccgttcagcctcgcttacacaattgaccagctgcgtttcagaagcgccctcggttatctcccgattcacgttgcggtcatttgtcgcggcaatgatgaaaaaagcgggcgcgagatccttcatgtcaattttacgggaaacccagcggatacgtccttcatccgccagctgtttaatttcaggcagggcatcgggactgattacagtaatatccgcgccttccgaaagcactgttttgagtcttcttaaggcaacattgcctccgcccgcgatgacaattctttttccgctgagattaatgtgcagaggcagcatactgtccccccttaaaatcaaactgcccgccggggtttcggacagcttccgtcacacggttcaaaaacgcctgcttaatatgcgggtgaaaacctaagtatgaagcgagatgaacattttgattgaccgtttgaagcttttgaacttcccgttcaatctcagtcattaaaagcccggtaaacagaagatatggaacgataaaaacgggtgctccgtcatcctcttcaaggccggcaaacacttctttatagtgcgggtcacatgctgttaaaaaacaagggatgacttctttaacaggtgtaatcgcctcaagttttccggcaatctcactgactgcgcttttaactgccggatctgtgcttcctcttccgatcagcaccactttcgcctgctcaatggacactccggtatcttcaatgcgatgatgcacggcttttacgacttcatcgtccactccgatcggaacaccatatgtcacttttatatcgggatgcagggccgccgcacgggcgatttcagccggaatgtcatgtttcgcgtgggcagcggtcaacagcagcaaaggcacagccgcaatatgagtggcgccttgtctgacacaagcttcaaatcccgcttcaatagacggttcctgcagttctaaaaaacagatttcctgaatgggagcgtcagcgtgtggcatgcacccttttaaaaacgccgccgactctgtctgcgcttttttcagcctgcttccgtgtccgatatataaaatcgcctgcttcatttacaacgcctcgctcaaatccggatttttctgatcagatgcataccagtccagtatgcagtgataattgacgacatcaccgataacaattaaactcgggtttttgatttcttcttttatcactgtgtctgaaagcgtgccgacggtgcagacgactgttttttgcctgtccgtcgtcccccaatgaataaaggctgccggagtgccgccgtctctgccgttttccagcagcattctttcaatctgccggatatttttaattcccatataaatcaccagcgtatcaatgcccgtcgccagcgctttccatttttcttcaaagtcgtcttcttgtttataatgccccgtaacgaatgcgacattggagctcgcctctctgtgcgtcaccggaatgccggcataagcagcagccgcgattcctgatgtaatgccgggaacgatctcaaacggaatggcgttttgcgcgagagcctccgcttcttcgcctccgcggccgaaaacaaacgggtcgccccccttgagccttacaacggttttcccctttttcgcatacttcacaaggaaacggttgatcgtatcctgtttcataatgtgaaaatccgggagcttgccgcagtaaatcagatccgcttcttctccggcgtactgtaaaatctctttgtttaccaatctgtcatataatataacgtccgctttctgtatggctttcattgccttcaccgttaataagtccggatctcccggaccggctccaacgataaatactttccccatagcatgtctccccgatccgttttgaaatcttcccagaacagccgcgaggccgcacttcagctattttaccatatcccgccattgcgggggatatccggctgattgcgcggcctttttggacctattatgctaagctgtttttcacaaagtcaaccagtcttccggtgcattcttcacgttcaaatttgcctgaatcaagtacgagctcaggcgctttcggctcttcatacggtgagtcgatccccgtaaagaacggaatttcaccatttcttgcttttttatataaccctttcggatcgcgcttttcacatatatcgaggtcgcatttcacgtagatttcattaaattcgccctctgccacaagctctctcacctgatctctgtcctcacggaacggagaaataaaagccgtgatgacgatggttccctgctgaacgaaaagcttcgccacttccccgatgcggcgtatattttccttgcggtcatcatcggaaaaacctaagtccttgtttaagccgtggcggatgttatccccatcaagcacaatgacttgatagccttgttcaaacagctcgcgcgctgcggcgtttgcaattgtggatttccctgaaccgcttaagcccgtcagccagaggatagagcttttatgcttgtttttctgctggtattcttctttcgttattgaggcttcatgccatacgatatcacgatttgtcactctattttcctccttaagaaacgcctgcttcttctttcgttttcagccctttaatcaacacctcgacaacttcaggacggctgaattccgccggcggcatgacgccgcttcgcagcatttctctgacctttgttcctgacagaatgacgtggtcttctctgtcatgcggacatgttttggccgttcccatgttgccgcatttctggcagaagaagctgtgctcgaatttcatcggtgtaattccgagttcatccgctgtaaattgatcaaacagctcttgcgcttcatatgtgccgtagtaatcaccgacgccggcatgatcgcggccgacaataaaatgcgtgcagccgtagtttttgcggacaagcgcgtggaaaatggcttctctcggccccgcataccgcattgccgccaaaaacacgccgaggaatacgcggtctttcggataataatgatcgagcagcacctggtagctttccattctgacatccgccggaatgtcatctgattttgtttcaccgacgagcgggttcaaaaacaggccgtcaaccgtctcaagcgcggttttttggatatattcgtgggcgcggtggaccggatttctcgtttggaaaccgacgatggttttccagcctttttcttcgaagcttcgtcttgtatcggcaggttcaaatgtaaactcaggaaactgctttgacgcttttttaattaatgtgatcggcccgccgacatacgtatcgccgcgtgaaaataattttttcacgcccggatgcgcggcatcatcggttttatatacgtgaacggcttctttttgtttatccggcgtataaatatcttcgatgtcgacgacgccgtatgtttctccgccgtaagtcagtttcaccgtgtcgccgacggcaagctcagccgctttttctgaatcgaccggaagcgtgatcggcagggaccagacaacccctgatgctagacgcatattttcaacgactgatacgtaatctttttctgtgaaaaatccttcaatcgggctgtaccccccgatcccgatcagctctaaatcagcgaacgaaatcaaatcaagctcaatttctttgtggacggatgtaagatcatactgctcattcacccgattaattaatgttcctccgtgcggtgctaaactcataatacatgattcctcccagttaacagataaataaactcagattaatagttaaatgcccccgccttgttcatggacagagcgtttctcttttcggatggctttcatcagactggcggctccgccagctgccaaaagcacgctggccatcataaagatggaatagtaatctccttttaacagcagggagacaagcagatacgaaatcgacagtgacaaaaacggcgaaacaacccatactttgagcatcgttttcacgacttctttatgaaaaacgttcggcccgtttttggccattccgataccgataattgatgatgatgtgacttgcgccaatgggaccggcagaccgaagacggaactgataatgacaagccccgcaccggttcctgaaagcagtatgccttctccggctgaaaacctcgtaatctttttcccgttggtttcaagcactttgcgtcctaaaagcagagcgccgagagcgacaaagatgcctccgtacagcgttccttttgacacgctgagtacgcccgcagccaccaaagggcccaccgcatttgcgacattgttcattccggctgaaaaagcttcccaaaaccccgcaaaaagcagcacaattcctaaaatcttctgtttccgtttcgaaatgactcgaatattcagagaactgaataccttcgatacgagaaaagtgaaacagaacgcgacgaacggtacgagcacccaaaaaatcacgatgaccaaaagatgctgtaaaaacaatactttgtacgcgacgccgacaccgacaatcgccccgacagtgacctcactcgtcgacagcggaatgccgagcacattcgccgtgaataacgatagcgccgccgctccgattataatgcagacaatggtgagcgtaatggtttgttcgggaatgattccgccgctgatcgtcttaacgacttcaccgccgccgataaccgcccctgacaggactccggccgcgcagatgatcagcgcatacgttttctttttaacggcgccggacccgtaagcgactcccattgatgccgcggctccgctggctccgatattcatggcaaaaaacagacagaataaaatagcggctaattccatcgggcagctcctttattcatgcagtccgcattctgttttcgccatgccgttccatctgccgctccgcaaatcttccgcggtaaacgcaggtgaagtgcacggttcacagccgatgctcggatacccctgatcatggaggatattgtaatccagctcatgcttggaagtatatctccagatgtctttccatgtccaatggatcagcgggcatactttaatcgattgaaacttgtcgtctttattcaggaaattcgtattcgcccggctcggcccttgatcccggcgaaggccggacagccatgccggatgccctgcgagcgcttctcttaacggcagaatttttctgatgtagcagcactggttcggttctctttcccacagtttatctccgtgagcctcggcctgttcctcgagagtaaggctgggctttttcaggataatgttcagccccggataacgttctttcactttttcgatcgtttcatatgtttctttaaagtgaagacccgtatcgagaaacacgatttccgcgtctttctttactttagaaattaaatcgatcaggacgatgccctcaatcccgaagctgcacgcgtaaacaagctggtctccgtagtggccgtatgcccattttaaaacggacagcgcgcctttataggaatcgtcttccggaaatgtaatcgccggttcctcccatgtatcatacgttagcattttttctttcctcctcccggagacaatcaaacagttgttgttctctgccggttgtcttatccctcaatctttttttcatataaaaaactttcaatccagcggaatgaaagacagtgacccggtatagcccttatcttcaaaatgctgtgcatttttctggatgcggcaccttgcaatacacgcaggttgccgggcgtcatcggtccagtccctcagccgctcttgataagctttttagatttgtactaaattttagcacaattctaacagaagtcaacccgagttttttgataggaataataaaacaggccctgaggcctgtttttattgtcattattttttaaaccaatcttttgactcgggattcagtttccatgatttcagtttttcaatgtcagctgaatgaatcgtaccgttttcaagcgcgacttcaatcagcgtgtcataatcggttaacgagtaataaggaagacccgcttttttaaaggcttctgttgctttcggcagtccgtatgtaaaaatggaaatgacgccgaggacttccgcgccctctctttgaagggccgccgcagcttcaagcacgctgcctccggtagaaatcaagtcttcaatcacgactgttttttgtcctttcttaatggcgccttctatttgatttcctttgccgtgcgctttcggtttgcttctgacgtagcacatcggcgcgcctgtacggtctgcgagaagcgcagcatgcggaatgcccgccgttgcagtgcccgcgatcatctccgcctcggggaaatgctccttcagcagtttgccgagcccgtccgccacatcatttctcacttttggatacgacaatgtcagacggttgtcacaatagatcggtgataaaatgccgctcgcccacgtaaacggctcattcgggcgtaaaaagacagcttcaatgtgtaatagatgttttgcgatagcctgtttcatcggcgaacgccctcccattccagtttaattgcttcatatgctttaacggggttttccgcttttgtaattgagcggcccacgacgatggctgacgaaccgttttctttcgcaaatgacggagtcgccgtacggacttgatcgtcagctgcgtcactggcggtgcggatgcccggcgtgactgtcagaaatgaaggccggaccgcttcataaatggcttttgtttcatggaccgaacataccactccgtccagcccgcactcttccgccattttgccgtaatgcacaaccgtttctaacagcggcttatgcagcagaagctcttccttcgccacctgctctgaagtgctggtcagctgagtcaccgcgattaaagacgggcgttttctgcctgccggcgtgccttcttcaagcccctcaagggccgcgcgcatcatgcgtgcgccccctgccgcatgcacattgacgagatcaacgccgaggccggccagccgcttcatcgctttattgaccgtagtcgggatatcatgaagctttaaatctaaaaatatatcacagttccgttcttttaattggtgaatgatggcggggccttcctgataaaaaagttccatccccgttttgacaaagagcctttccttttcaaacaagtctaaaaacgttaaagtctcttcccctgatgcaaaatcaagcgcgatgatgggcaggttgtttttcatgtttccagctccttccgatgcattcacttacagattgaaagccgtgttggcgcagcacgtgggggagctgttctatgatttccgggcagacgaacggattgacgaagttcgccgtgccgacggcaaccgcactcgctcccgcaagaagaaattctaatgcatcctctgcggtctgaacgccgcccatcccgataatcggaatttgaacggcctggctgacttcgtataccatccggatggcgaccggtttgatcgccgggcctgacagtccgcccgttttatttgctaaaatcggccggcccgtcttgagatcgagcctcatcccgatgagagtattaatcatcgtcagaccgtcagcaccggccgcttcaatcgctttggcaatttcggctatgtttgcgacattaggcgaaagcttcacatacacaggcactgcggaaacttctttcaccgcttttgtcagttcggccgccatgacgggatcagtaccaaaagcaatcccccccgttttgacattcggacatgaaatgttaagctcaagcgcatgcacattcggcgcttggctgatgtgctcggccacttctttatagtcgtccacctgagaaccggcgacatttgcgataatcggcgtgtcaaattgttcgagccaaggcagctcgtgattgagcacatgctcaaggccgggattttgcagtccgatggcattcagcattcccgcgcttgtctccgccactctcggcgtcggatttccgaagcgggcttcgttcgtcgtggctttaatcataatgcctccaaggcatgataaatcgtaaaatccggcatattctttcccgaaaccgaaacatccggaagcggggatgatcgggtttttcaattggagacccggcagattcacctctaacattacagcgccacctcctcagctttaaataccggcccgtcaaggcagacctttacataggatgtatcgctttcacccgtgcggcacacgcaggcgaagcaggccccgatgccgcagcccatccgctcttccatcgaaagataaacctctttatggccgtactgctgcttcagagctttcagcatcggtgtcggtccgcagcttagcaggacatcgaattcgagctgcttttcacggatgatatcggtgacaaatcctttctctccatatgttccgtcagccgtcgccacataagtgtctccgtacgcacggcattcctgttcgtaaaaaacatcctttgctgattgaaatccaagcacatgaatgacgtttacgcctttttccgtcaggcgctttgacagttcctgcaaaggcggaacccccactccgcctccgactaacagcgcggttttgccgggttcaatccgccgcacgggaaatccgttgccgagagggccgagaacgtctattttgccgccctcttttttcccggacaaaaggcgcgttccctcaccgtcagctctgtagataacggatacttcatccgcggcgaaattgacgtccgcaatgctgagcggtcttcttaatagcggtgtgaccgcgtcactcaccttcagatgaagaaattgtcccggctcggtaaggtgccggacaagctctcctttcagcaccatcttataaatccggtcggcaatttctaagttggattgaacagtcaaatgcgcttttttcatatcgtgactgccgccttttgattggtttcggatgcaggcatatgatccgcccggaatgtcatgctttccaatacccgcaaaatggcttcggccgtatctaaagatgtcaggcaggcgactccgttctcaacggattcgcggcggattctgaagccgtctctggccggctgtttgccctttgtcagcgtattgatgacaaattgcgcttctccgtttctgatcacatcgagcagatttttcccttcttcgccgattttcccgacgacttgagccggaatctgagcgtctttcaaataagccgccgttccttccgtcgccaagattttatagccgatggcgtggaaccgcttggcgatcagcagtccttcttctttatctttatcagcaacggtcaacagcactgaaccgtagttcgggatttgaatgcctgaggcaatcagcgctttatagagcgctttttccaaggttgaatctttgcccatgacctctcccgtcgacttcatttcagggcctaacgtgatatccactcttctcagcttcgcgaatgagaagacaggcgctttcacgaacaccccctgctgttcaggctgcagcccctcttgatagccgaaatcagcaagcttttggccgagaatgacctttgtcgccagattcgccatcggaatcttagtgattttgcttaagaacggcacggttctgcttgaccgcggatttacctcaagcacatacacctcaccttgcgaaagtacgaactggatgttcagcaacccgatgatgttaaggccttttgccaaggcaacagtgtattgttcgatttttttcttaatgtctccgcttaaagactgaggcggatagacggcgattgaatcccctgaatggacgccggcccgctcgatatgctccataatccccggaataacgactgtttcgccgtcagatacggcatcgacttcgatttctttccccgtcagataacggtcgattaacaccggatgctgcgggttgattttgaccgcatttttcatatagtgaagcagttcttcttcgtgatagacgatttccatcgcccggccgccgagcacatacgaagggcggacaagtaccggatagccgatggatgcagcgattttgaccgcttcgttcaccgacacggcggtttttccgagcggctgcggcacattcagcgcctcaagcgcctgctcgaacttatcccggtcttccgcacggtctaaatcttcaagtgatgtaccgagaattttgacgccgcgggcgctcaattcttccgcaaggttgatcgccgtctggccgccgaattggacaacaacgccttccggctgttccaaatcaatgatgtgcatgacatcttctaccgtcagcggttcaaaatacagtttgtctgatatgctgaaatcagtggacaccgtctcagggttgttgttgataataatcgcttcatatcctgcctgcttaatcgcccagacagagtgaacggtcgcatagtcaaattcgacgccctgtccgatgcggatcgggccggagccgaggacgacgacgctttttcttgatgttacctcagactcgttttcttcctcatatgtgctgtagaagtacggggtttctgattcgaattccgccgcgcatgtatccaccattttatatacaggcttgatggctgcttcttttcgcatttgatacagctcttgttccggcatattccattcccggctgatatatttgtcggagaaaccgagttccttcgctgtctgcaggacggcgaggctgcctttttccgctttcagctcggtttcaaaagcgaccagcttacagagcttgtgcaaaaagaatacgtcaattgcggaaaactcatgaagctgctccactgtgtagcctcttctgaacgcttctgcaagataaaacagccgttcatctccggcctttctgatccgtttttccaaaagcccgtcagaaatctcttccgcatccttcagttccaggtgatagacatcggcttccagtgagcggaccgcctttaacagcgattcttcaagggtgcgtccgatggccatgacctctccggtggctttcatctgcgtcccgagcctgcggtttgccgactcaaatttgtcgaacggccagcgcgggattttagaaacgacatagtcaagcgcgggctcaaaagccgcatatgtttttcccgttacgggattcatcatttcatcaagagaaagcccgactgcgattttcgccgcaagctttgcgatcgggtaacccgtcgcttttgaagcgagggcagatgagcggctcactcgcggattcacttcgataatgtaatattggaagctgtcgggatcgagcgcgagctgaacattacagccgccttcaatgccgagcgcgcggatcagctttaatgaaacattgcgcaaaagctgatattcccggtcgctcaaagtctggctcggggcaacgacgatgctgtcgcccgtatggatgccgaccggatcgatattttccatgttgcagacgacgatcgcgtgatctctgctgtctctcatgacttcatattcgatctctttgtaaccggcgatgcttttttccagaaggcactgatgaacggggctgagctttaatccgttttcgacgatctctttcagttccgcttcattcgagcagatgccgccgcccgttccgcctaatgtgtaagcggggcgcacgataaccggaaacccgatccggccgacaaattcctcggcttcctgtaaagtgcggatgatctcactttccggcaccggttcattcagctcattcatcagcgtacggaataagtcgcggtcttcagcctgctggatggcggacagctttgtgccgagcacttccactccgcattcctcaagaaccccgagttcagacagctcgacggcaagattcagtccggtctgtcctcccagagtcggcaggatggcgtccggccgttcttttctgataatacgcgtgagaaactccggcgtcagcggttctatgtatacccgatcagccatttccgtatccgtcataatcgttgccggattcgagttgacgagaatgacttcatagccttcttcctttaaagcgagacacgcctgtgtgcccgcataatcaaattccgccgcctgtccgataataatcgggcctgatccgatcactaaaatctttttaatatctacgcgttttggcataccgcttccccttctttctcagttgtttcgatcaagtcaatgaatctgtcaaataagtgattggcgtcttccggtcccggtgaagcttcagggtggtactgaaccgtaaatgccggcaatgttttatgcttgagtccttcgatcgtttgatcattgatcgcaatgtgcgtcacttcaagctctgtctcatctattgaagaaactgtatatccatggttttgggctgttaaagcgactttccctgtcgcaagctctttaaccggatgattggaacccctgtgtccgaatttcattttttccgtttccgctcccgatgccagcgcaaataattgatggccgagacagattccgaataacggcaccttcccgagtatgccttttatcatttcaatggcttccggcacatctttcggatctccgggtccgttagaaagcatgatgccgtccggcttgagctgaagcacttcttccgccgttacattgtacggtacaacgatgacatcgcattttcttttgtttaactctcttaagatgccgtgcttcataccgaaatcgacgagcacgatgcgtttgccgcggcccggactcggatatgccgttttcgccgatacttgagcgacttgatttctcggcagttccgtttctttcagccttgcaagaacctctccgacattctcctcacttgaagcaaacgttccttttaatgccccggccgtgcggatcattctggtgagttttcgcgtgtcgatcccttgtaagccggggatttttttcattttcagatactcatcaagcgtgtaagctgagcgccagttggaaggcagctcgcacagttcttttacgatcagcccttttacaaaaggagtgatagattcaaagtcatctctgttaattccgtagttgccgatcagcggatacgtcagcgtcacgatctgcccgcagtaagaagggtctgataaaatttcctgataaccggtcattcccgtgttgaatacgacttcacccgcggtatgctccaggctcccgaatgcttcaccctcaaataccgctccattttccagcactagtcttcttttcatttgacgagtctcccttcttcatatgcaagcttaccggcagccatcgttgcaacaggccagccgaagcacttcatcttgttgaatggcgtattttttcctttagataaaaatgtatctttgtcaatggccgcttctttgtccagatcaattagggtgatgtcagccggcgcccccggtgcaagcgttccgtacggaagaccgaatgcctcgcaaggttttaccgtcatgaaatcaaccagctgcttcagcgtccacgtcccgtttttcacaaaatgtgtgtacagaaggggaaaggcagtttctaacccgacaataccgaaaggcgcaagcttcatgtccgtgtttttctcttcttctgtatgcggcgcatggtcagtggcgatgaaatcaatcgtgccgtctaaaagcccttcaatcagcgcctctctgtcctctttgctgcgaagcggcggattcatcttaaaattggtatcaagtcccgggatatcttcgtcacaaagcagcaggtggtgcggcgatacttccgccgtcacgcggatgcccgctttttttgcgtctcttacggctctgacggattctttcgtgctgatatgacacacgtggtaatggcagcccgccgcttccgccagcagcacgtcacgggcgatatgtaccgcttcacaaatggaaggtatacccttcaggccgttcgcttttgaaaaagaaccttcatgcacgctccctccgtaaataagtgagttatcctcacaatgagcgacaatcgctttatttattgaagccgcccgtttcatggcttcatacatcattccggccgtctgaactccgacgccgtcatcggtgaaggcgaatgcgcccgcttcatgaagcgcctcaaaatctgtcatctcttcgccggtttgtctgatcgtaatcgatgcgtaaggaaggaccctgacagatgaggtttctttgatcctgttttgcagccattccatctgctctttcgtatccggcaccggccttgtattcggcatggcggcgactgtggtaaaaccgccccgcgccgcggctttagagcccgtctcaatggtttcttttttctcgccgcccggttctctgaagtggacatgaaggtctacgagcccaggtgaaacgaacagtccctcagcgtcgatcaccgtttctccgtctttcgctgtcagaagcccggtttccgaaatgaattcacccgttacccggatatcatgtaccgctttttctccctgttcatttaatatccagccgtttttaatgagataagacataagccgcttctccccttttcacattggtttgcagtgctctttttaagactgccattctgatatacacaccattttccatttgtttaaagattcttgattttccgcattccactaatgttgtgtcaatttcgactcctctgttcaccggtgcgggatgcatgatgatagcatgccgcttcatgctctgcgcccgcttttcggtcagcccgtatgcttccaggtagcctttttggtcggcttctgtctgatgcctttcattttggatgcggagcagcatgacgacatctgaagcttgtatggcctcatccgtctgaacacaggtgccgaaggcgtttttctcatcctgccactgcggcggcccggaaaacagcacacgtgcgccgagccttgtcagcacctcggcatttgaccttgccactctgctgtgtttgatatcgccatgaatggaaaccgtcaggccctgaaaggtctcaaattcctcttgaatcgtcattaaatcaagcaatgactgggtcgggtgctgtccgcagccgtctcctgcgtttaagaccggaatattgactctgccggtcagatctttgtaatattcatccgtgctgtgcctgatgacgcaggcgtccgctccgattgattccagtgttttgaccgtgtcgtataaggactcgcctttttgaacgcttgtgctcgtgccgtctaagctgagcacgttcatcccgagtttcttttccgccacttcaaagctgaaccgcgttctcgtgctcggttcaaaaaacagattcgcaacgaattttcccgcgagatcgggacggactgcaccctcttttatcgcttttgcctctcgcagcagttctgtaatttcagccgcgctcagttcagacatcgccgttaaatgattcatgttttttctcctccgtttccgcttgaaggccgtaaaaaacaccccggtctatagactcggggtgcggttaaagagagaagagccgtacagcgtcttcccgttataacccttccaagcctctctggactttctttaaaaggtttacatatgatttagtttttccgatgcaatcgcgtcttcttcatttgcatgcggcaggataaggttcaggatgactccgacgattgccgcaagcgccatgccggatatttggaacccgccttttgatacttgaataaaagcccctccgacgccgatcacgaggatgacggatgtgataattaaatttcgcttgttttcataatcaatgttgttgtcaatcagcattctcaagccgctggaggcaatgattccgaagagcaggaaggaaacgcctcccataaccgcggacggaacagagctgatcagcgctgaaactttgccgataaatccgaagcacagcgcaatcactcctgcgccgccgatgacaaagacgctgaaaactctcgtaattgccaggacaccgatgttttcgccgtatgttgtcgtcggcgggccgccgattaacgaagcgataatcgtcgctacgctgtcccccattatggagcggtgcagtcccggctttttaataaaatcctgtccgacgactttactcagcaccatttggtggccgatatgttctgacatcgtcacgaaagcgaccggcaccatcgcagcggcaatgcccaatgtcactgacggcgtgtagtctttgaaagggatgataaattcaggaacggcgaaccattttgcatcaatgaccggctgaaaattgacgatgccctgtgtcagcgcaaacagatatccgcctataatgccgatcaataccggaatcaagcttaaaaatcctcgtaaaaagatggcgcagataatggtgatggccaaagtgacgccggctacactgaaatgtttcaggctgtaaacgagttccttcgcattcggatcagcatacattgccatattgacggctgtgcttgccagtccgaggccgatgacgatgatgaccggcccgacgaccaccgggggcagcagcttcatcagccaccccgttccaagctgcctgatgagaagcgcgatcaggccgtacacaattcccgccaggaaagcgccgaccatggcagcccccggccctcccgtcgccttcaccaagataatcggtgatataaaggcgaatgatgagccgagataagcgggaatctggccttttgtcaccaagagataggcgagtgtcccgattccgctcgtgacaagcgccactgccgggctcattccgaccagtttcggcacgagtatggttgaaccgaacatggcgaataaatgctgcaggctgaatgacagccaggacaatggattggggacgtccctgactcccaggtttacttttttcttactcatggcgttttcctcccggttgactttcaaatggtataaaaaaacctctttgctttttgcgcaaagaggcatacaaagcccggccgtgtcgatccgcccggctttgtgttttaaaatcctctttgcaaactctctggaatgcatttaaaaagggtggttattcattttcgtaaatggcgaccatatcagtctgatcaacttcgctcagctgaaccatcactttttcagcttttgaggtcggaatgtttttcccgatatagtccgctctgatcggcagctcccggtgtcctctgtcgacaagcacggcaagctgtatcgatgacggccgcccgacatcaacgagagcatccatcgcagctctcaccgtccggccggtataaagcacatcatcaaccacaatgaccttttggtctgtgatatcggccggaatgtccgcgccttttacaagcggctcttcattgctcgttttttttgtgagatcgtcacggtaaagggtgatatcgatttccccgacggtgaccggatttccttcaatctgttcgatccgctcggccagccgcttcgctaaataaatacctcttgttttaatccctacaagaatgcagtcattcattcctttattccgttcgatcatttcatgggctatccttgtcagcgcccttctgatggcctgttcgtcgagaataacagctttttgattcaatcgtgacacctctccattcgtatataagaagaaaaaacccctcctgccagagcatagaggggttcctttccaggaccaagacacacgtgtatctcttctgtcctatccgttatccttctcagcctctctggactgtgttaaagaatctattcagcttgtttttattatttcagaaaagaaactcgctgtcaatggctatttctcaaatgttcaatgagttttttcatatcttcaggaaggggcgcttcaaactccatgtattcgcccgtccgcggatggtcaaaacctaatattccggcatgaagcgcctgaccgttgaaatcaatggtttttctcggtccgtacttcgggtcgcctgccaaaggaaatccgatatatttcatatgaacacggatctgatgcgttcttccggtttcaagacggcactctacgagcgtgaagtcttgaaaacgctcaagcacgtggaaatgcgtgacggcgtttttgctgctttctcttgttacggtcatgctttgtcggtcttttttatctctcccgatcggagcgtcaatcgttccgtcatcatgtgaaatcaacccgtggacaaccgctgtgtactttctcgtcacggttttattgacgagctgattaacgagtgattcatgcgccatatcgtttttggcgaccattaacaggccggaggtatctttatcaatccggtggacgattcccgggcgcatgacgccgttaatgcctgaaagatcgttgcagtgagccatcagtccgtttacgagcgtccctgtcacatggccgggcgccgggtgtacgaccatgccccgcggtttgttcacaaccaagacatcctggtcttcatagtaaatgtccaaatccatcggctctgcaagcacgtccaattcttccggttcaggaatggtgacgtttacctgatcgccgggctgcattttataattcgcttttacggatttgccgttaacggataccagtccctcttttacccattgctgcacttgagtgcgtgaccagttttctcccgttgaagccaaaaatttatcaatccgttcgctcttttgttcaggctgaacggttatctcaaattgattcatgttattgctccttctttttcccgctgtcaaacagcatatgaataaataaaagtattacaccgacgcacagtgaggagtccgcgatattaaaaatcggatagtgataatccacgatgatgacatgaataaaatccaccacttcctggcgcgccgcccggtcaataaagtttccggccgcacctcccagcattaagccgagagaaattccgagtaacatctgcccttttgcataacgctgtatgtaataaacgattccgataatcacggcgatggtaatgacgtagaaaaaccacatttggccggctaaaatcccccacgctgctcccgtgttgcgatgagatgtgatataaagcacctggtcgatgacaggtatgctttgtcccaattccatatggctgacgacaagccatttggtcaattggtcggcaataataataaaaagagcgataagataataaagcacacacgttcctccagtatacagttacttttatcctttatgaattttatcagtaaaagatgccggagtaaaggcagatcataagcgtatgcaaacagacgctgtcactcatacagcgcctgatcatatgcataatctccggttacccagtatggaagggttttcttttcaaattgagcgggataataaaaatcatcagcggttctggccgtcggcagcaccgcaagtttttcaatcggaatgggggcgcctgttttttcacaataaccgtacgtattgttttcaaacttagacagggcaagaagaacatcctgaagttcttcttttatatgatagatcagagttgcttcttggtcgttcattgaaggttcaacagatgctgacatttgaaagcaagaatattcgaataatcttgattgaagttcttctttcatcatgagaagctccgtgtggattgcggtcagttgatcattcattcatcacaactcctgctcttgatgttatagctttattgttgccctcagagcgctatttgaagcccataagaattttcctgccgttctaatcgatgacattgctggcatgtaaaaaagcgcccggctgacaccgggcgctttctcatttattatttttgataatatttttcaacgatttccgcattgcgcagtgataatgtcggatatttcggattggctccgacatctttagaaattacgcgggaacgctcacacatctggccttccgctttttctacggtcatttttcctgttgtaaagctttgcgcgttttccggcgcttcactttcgtcttttactgtcagttctgagacgataaacagctgcgcgatgttttctttaatggatgacaagaggtcgcggttttctttgttcggatacaaagtaaggctcgcttccaatgatcttccgataattttttcgttacgggctgtttccaaagctttcagcacgtcgtttcgaagctccatgaagcggtcgaatttttcttctgtcgcctgactgtccggaacagcaatggtttccggcatatctgtcagctgcacgctcgcttcttcaacaaatgataagtgagaccacatttcatccgccgtatgcgggagaatcggcgccgtcagtttcactaacgccagcagcgtttcataaaagacggtctgcatgctgcggcggtccggatgatccgcatgctcgatgtacacaacatcttttgcaaaatcaagatagaaggagctgagctcgatcgtacagaaattgtgaatgctgtgataaacaaccgcaaattcgtattcatcgtacgcttttttcaccttatcgatcagcttattcagcttgatcagcatatattgatccacttcgcggagatcttttacatccacggcattgatgcttggatcaaaatcgaacaggttgccgtgaaggaagcggaacgtgttgcggactttccggtatacttccgcgacctgcttcagaatatcttcagaaaccgggtgatcggcctgatagtttacggaagatacccataaacgcagaatttcagctccaagctgttttgcgatttttgtcgggtcaatcgtattgccgagtgatttactcattttacggccgtttgcatcaagtgtaaatccgtggcttaatacgcctttatacggcgctttgccggtgactgcaacagcggtggaaagagatgagttaaaccagccgcggtattggtcagagccttcaaggtataaatcagccggacggacaagatcatctcgttcttcaagaacggcctgatgggaagaacctgaatcaaaccatacatccataatgtcttgctctttcgtgaagattccgttcgggcttcccggatgtgtaaatccttccggcaggaggtcttttgcctctctttcaaaccatacgtttgagccgtgctgtttgaacagctcagacacgtgttcaatcgtttcgtcagtgatgatcggctcaccgttttctgcataaaataccgggatcggaacaccccagacgcgctgtcttgagatacaccagtcaccgcggtcgcgcaccatgttgtaaaggcgctgttcgccccactccggcacccacttcgtttgtttgatggcatcaagcagatcggatctgaaatctttaattgacgcaaaccattgcgcagtcgctctgaagatcgtcggttttttcgttctccagtcatgcggataggagtgtgtaataaactcgagtttcaaaagcgcgccgttttcttcaagcttctccgtgatcggtttattggctttatcgtaaaacattccttcaaagcccggcgcttcgtcggtcatgtttcctttttcatcaacagggcacagtacttctaagccgtacttttggccgacgataaagtcatcttccccgtggcccggggcagtatgaacacagcctgttccggcatcggttgtgacgtggtcaccgagcatgacgagtgaatctctgccgtacagcggatgttctgcagtgatgtattctaattctctgcctttatatgatgcgacaacttcaggattttcaaagccgcatgcctccgctacgttttcgatcagttcagccgccactacataacgcttgtctccaaccttgatgacattgtattcaagatcaggatgaacggaaattccgaggttggcaggcatcgtccacggcgtcgtcgtccagatgatgaagctttctccgttttccagaacgcctttaccgtctttcactttaaacgcaacataaatagacgcggaacgtttgtcctgatattcaatttccgcttctgctaaggcagattcacttgaaggcgaccagttgaccggcttcagacctttataaatatagcctcttttcgccatctcgccgaaaacgcggatctgctgcgcttcaaattcaggctgaagcgtaacatacgggttttcccaatcgcctctgacgccgagacgcttgaattgttcgcgctgtctttcgatctgctgccatgcataatcttcgcaaagcttgcggaaatcagcgacggacatttctttccggtttacttttttgtttttcgtcagcgccgtttcaatcggcagtccgtgcgtatcccagcccggcacgtacggtgcgttgtagccgctcattgatttatagcggacgatgaagtctttcaggattttgttcagggcatggcccatgtggatgtctccgtttgcataaggaggtccgtcatgcagcacgaatttcgggcggtctttcgtccgttcttgaacaagacggtaaatgtcctgctcctcccagtctttttgcatgtccggctcacgattcggcagatttccccgcatcggaaaatctgttttcggcattaacagcgtatctttgtaatccattttcattcctccacaacatttttcagaaaataaaaaaagccctctcatcccataagggacgagaaagcttatctcgcggtaccacccttttagaaaaaacggatcatccgtcttttcctctcgaacatcgtaacgtgatggaacgtcctttcctactctcggttcagaaaggaaactaaagggctgatctgcatgattccggccatcccgggctttcaccttccccggttcgctttatagcctgttttgagtcatgccggtccctttcaatcgtcttttcatctgaatttatgaacgtattatattcgaacgggccgaagaatgtcaagaaaatcagaaaattattctttttcctcaaataccgcgtcgacttcgtattccagcagatgatcccaatcatcgttcttcagcaggtcgagctgcgcttcaatcagcatttggaaacgtgttctgaagactttagactgttttttcagctcttcgatttccattgcgatttttcttgatttggaaagcgactcattgatgatgcgatcggcatttttttctgcttcacggacgatcagcttcgcttctttctgcgagttgcgctttacgtcttctgcggcttcctgggctacgagaattgatttattcagcgtttcttcgatattggcaaagtggccgattttttcgtccagctcgttcactttcgcctcaagctccgtttttttacggagtgcgatttcgtaatcttttctgacctgcattaaaaattcatttacttcatcttcatcatatccgcgaaaaccttttgtaaacgttttgttatggatatcattcggcgttaatggcatattgccacctccatttttacatttcagtacggttatctagttcacattataaaacaaatacggcacagatggagaaaaaaactgaaaaaacgactcatttttgccgttcaaatgtaactttccatttgtcttttttcgtttttccgtcaacttttgccaaactgcatcgtccgaagccgcgaatcgagagcatgtccccttcagcaacctgataagacggatcttcaatagctttccaattcaccttaacgagcccgtttttcacaagcgcctgcgctttctgccgggattgcctgctcattgaagcgcagacggcgtcgagacgcaatgaagaaaccgtgtcatcccttatttcgacatctgaagcgggaatgtgaagagcggaaagctcgattttctcaagctttaccggcgctttgcccgccttggtcagctgagtgctgacaaaatcggcgatttcaccggagacgatgagctgcacggcttcctctgagaaaatcagatcgccgtatttctgccgctttaagccgatccccattaatgatccgagaagagagcggtggtcaatgctgacgaatttttcagcgtattgaacgtcaaaagcccggagctcaaaatcatcctgttcaggttccatatattcagggtataaaatcgcgcgtttgcgctcagctctgtcatatcctccgaaaaacgcaagaccgcaggcgtcgccgataacggcttttacaatcacctgttccctgggatctaagaaatcagtcagcttcatccgatactggtccaggacaatctgtttccattcaagcacctgatcaataaaaggccgctcgtcttgtctgaagtgctggtaaatatcgctcatgttctttcctttctatgtaaagaggcttggctggtgccaagcccgtatcaaactgtcgcattcaagtatacattgcgatcatgcggtataggccccaaagtcccgtcgtggcaaaccgaagcacgataatcgctacaatcggggatatatccagcatggcaatgggcggaatgatccttctgaacggctctaaatacggttcgcaaatcgctgcgagaaaccgtccgaccgccgtttctctcgtactcggcacccatgacataaagatatagatgatcagggcaaacgagtagatgtaaattaaataactcagaacggaaaaaatttgataaagaatcatcctgctttaccacctctgatgttcgtcttcatttataagctccgaaatcgtgccggaaacgtcgacattatcaggcgtgcacagaaaaatatctgaaccgattctctgaatgtcgccgccgatggcgtagacggtaccgcttaaaaagtcgacgattcttttcgcctgatcatgctggatgcgctgcagattgacgacaaccgcccgcctgttctttaaatgatcggcgatttcctgcgcttccgcatatacacgcggttcactcaagaccactttagaggatttctgaacactttgcaagcttactacgttctgcttgccctgcggcttctgagcgtaagcaggctgtttatctttctgctgttcatgctcttcctgatgatcctgctccgtttcaatgtattcgtactcgtactcctcctcatccattgagaaaaagtttttcagtttatttttcatgctcatttgtttacaccccccggttcatttccgactaatgaagagccgattctgataaaagttgcgccctcttcaacagcgatttcataatcatttgacatgcccattgacagttcccggcacggcgcgtttgtctgattcagtttttgcacctgatccctcagatcacgcaattgccggaagcaggctctgatcgtttctgtatcgtctgtcaggggagccatcgtcatcaggccctctacagaaatgtttctaaactcagaaagctctctgataaaggggatgacctcctctgttttcaaaccgtgcttagacggctcaagcgaagtattcacctgcacaaaacagcgaaccgtatgctgcgcccgtttttcaatctcttttgccaatgacagtctgtctaaggaatgaatataagatacacggtcaacgacggccttcacctttctggactgaagactgccgataaagtgccacttcgggcttcctttgatgacttcctgcttatggataagctcggcatcccggttttctcccagacttgtaataccggcatcaacggcctcttgagccctttcagctgatacgtattttgtaaccgcgatgacggtaacatcttcggggcttcggcccgatctgttacatgcttcgtttattctttcgtttatatgtcgtaattgatcagcaacacgcaagatctaatgcctccttcattccgataaaggacatcatgcgtcccgttttccctttgtcgcggcggtgtgaaaagaatagttcatgctctcgttcggtgcataatccgctgactgaaatgttttcttccggaatgccgcaatgtatcagaagaagacggttgacctcttttaaatcaagctgatactggcctttttccgtttcgcatatggcggattcagccgtaaagggcagcgcccgcacttcattgatgacgcggtcgtcgactgtatagcttcccgcgctgatggacgaaccgatgacagcctgaatatctgttaaacgggagccttcttcgtttacccagcgttccgtcatgatgcgtccgatttgtttgaccgtccccttccatccggcatgggcagcgccgataatggatttcaccgggtcataaaaatacaagggcacacagtccgcaaaacaaagggccaaaaaaagattcgcatctttcgtgtagagcccgtccgtcccgcggaatgcggaagaatagtctctcgctccttttcctttatccccggctgtcacgcgccggacgcggttttcatgtgtctggtcggcgaacacccaggaatccagatcagtaccgcataaggacgctatgacttcacggtttgtcacaacatcatgagcttcgtcccggacgtgcaacccggtatttaatgactcatacggaggattgctgacaccgccgtttttcgttgtgaatccggcgatgacctttgtgttaagctgattcacacagttccagtcttctatcatgagtgccgaggggtggtaagactaaacgggtgatatgtattcatggagatccaacctttcgacaaacattaaaaaagcgtaatttcccactcattttaacacaattttaagcatacgtttagcggctgattgaaaaatgagataaataaatgtgccggaaacattgagatttccggctttttacaagtaaagggaggattacgctccccctttggttcatttacacgcactaagatgacatcttccccaattttaactatatttcgccaaggaatgatcatttcctcttcttttccgaaaaaaccgagaacttttccgctgccgcctaaaataatcgcctgaatttttcccgttgtcacgttaatatcaatatccccgatgcttccgagtttttttccgttcgacacgtttaccacatcttttatttgaaattcagatatgctgatcatccgtatcacgccctttgcccgttctttttcctattatatgaacggccgggctgaaccttgtcacatcgggcaatcttttttgcggctgcaccagccgagaataaatctcagcatgattttcgtatagtccataagctcatcaacggacacttcctcgtttacggagtgggcgttttttaaatcgccggggccgtatatgacgctcggaatcccggcctgataaagccatcctccgtctgttacggtttgggaaacatcaatgacgggctcctgttttatgacggcagagtgtgatgcagccaagacagaaactgccggatgatccggatcgatttccagcgccgggaacacctctcctctgtcttcaatcatcgaagatccgccccatttgaacaccggcctgttttctttgagccacagatcactgtcagcgacacgattaatatagtcttcgatttctgcggctgcttgttcgtgcgtttcgttcggataaaagtggacggtgatccataaccggcattcatcggcgacaaacgctgcgtgtcttccgccttcaatgacggcggggttgatcgtattggtgccgggcgcaatgccgggatagcttttcgttaccgcccagtggcgctccagctctcccaaggcagtgatgattttcgccattttttcgatggcgctcgctccgaatgtgcctccgcccgcatgaatcatattgcgcctcatgccgtcatgaaatgtttgtttgcttttcaattctatccagccggtgatgacaccgccctgcccttgaatatgcaggctgctcgtatccgcgacaaccgcaaaatccgcgtgatagccgcgtttgcagcattccagcgtccccgcctcgccgacttcttctccgattacagactgtacaatgaggtcgcccggaagcttaattgcggcatcatggatcagcttcagagagaaaagaacacacgccaacccccctttcatatcagcggcgccccttccgatcagcatgccgtcttttacgagcggctgaaacgggtcagagttccaatcttcgcccccggcttctgccacatcaatgtgtccgtttaaaatcaggctttgatgcctgcttgaatctgtcccttttaaaacaccgactacattcggatcttccggatacacatcccacatatcgaccgagcagcccgtttcttttaaaaagccggccacccacttttgggcttctgccgtatttcttgctggcggggccggagtgggaaaggcgatcaacctttcagcaatatgtatgaagtcgtgcctccgtttctccgcctgttgtaacagcatatcaatctgatgcattggaaatctcccctttagctgtatcaaaaaacccgtttcattaaaatgaaacgggtaaaaaacggatcttcctccgcttttttcaccgcttccctccgccggcatgatccggatcaggtccgttaagggttgagacaacgtctctctcagccgcatggcagcacccccagggtgaattgatgttattttacggttgatgcctcttttgcacgtgttaaaaacgggcggccattgttccataagacattgacaggcgtatcgaaaaacgctgtaagccgctcgtcagaaagcatatccctgattttcccggaggcgaacacctcgccttgttttaaaagcagcgccttatcaaataccggcagaatttcttcagcgtgatgggtgacataaaggatggacggcgcattttctttttcggcgatcgacgtaatcgtgtccagcagctgctcccttgccataaaatcaagacccgtcacgggctcgtccaaaatcagcagtttgggatcagccataagcgcccgcgcaatcagcgctctttgtctttccccttgtgataatgtttcataccgcctgtcggcgtaactgatggcgcccaaatccttcagaagaccgatcgctttttcccttacctgctcactcggagtttcgtacagcccgattgaggcgtacgcgccgctgagggcgatttcaaaagcggagtccgcggcatataatttgtgctgaagacctgccgaaacaaggccgattttccttctgagcctgtcaccgagctctgttttgccgaactgatggccgagcacctgcatctctcctgaagtggggaagtaataagagcataacatattcagcaaagccgtttttccggctccgtttaatccgtacagcacccaattttcgtttttctcgacgcgccagttaatatctttcaaaatccatttcccgtttctttttaatgacacactgtccagctgtaaaatcattgccgtttcccccgtttactttatttaaattttctaaaaacttttacacattagaatacatcacttttttgcaaacgtaaaccatcgcatgaaaaaagcctttaaacaaggtttaaaggctttttccgttattgatggatattcttattcatttgtttaatggctgccttttcaagccttgagacctgagcttgggatatcccgatttcttcagcgacctccatttgggttttcccttggaaaaagcgctttcgcaaaatcattttttcccgttcgttcagtcttctcatgccttctttcagagccagctcctcaatccattgtgtatccttgttgcgctcatcgctgatctggtccatcacgtagatcggatcgccgccgtcattataaatcggctcaaacagtgaaaccggatcctggatggcgtcaagggcaaacacaatttcttcatggggcacttcaagaactttggcgatttcctctgctgtcggctccctgcttgtctcactgattaaccgctctcttacttgaagcgctttatatgcgatatcgcgaagcgacctcgagacgcggatcggattgttatcccgcaaatatctgcggatttctccgatgatcatcggtacagcgtatgttgaaaacttaacattatggcttaggtcaaaattatcaatggatttcattagtccgatgcagccgacctgaaataagtcatcaacatactctcctctgttgttaaacctctgaatgacgcttaagacaaggcgcagattgccgtttacaagcttttccctcgctgaatcatcgccctcatcctgcaattgcctaaacagctttctcatctcttcattcttgagcaccggtaatttggaggtatccaccccgcaaatttcgactttatttcttgacacgtttttccctcccactaggagctgctgtacaacgttaagtatctcctcgggtgggaaaaatatgcaccgctattttacagaaataaacatccggcggcggcaatccttgcagcagtaagggctgtcagatggaaaaaattttacaccattttgttaaactcttttctcagtcttttgataatccgcttttcgagccgggagatataagattgtgaaatccccatcatgtcggctacatctttttgggttttttcttcttctccgacaagcccgaaacgcagttccataatctgcttttctctttcgtttaattgctcaagcgcttttttcaaaagttttttatccacattggcttcaatgtctttcgtaataatatcatcatctgtgccgagcacatccgaaagcagcagttcgtttccgtcccaatcaatgttcagcggttcatcaaaggacacctctgaacggattttattgtttcggcgcaagtacattaaaatttcgttttcaatacatcgcgatgcgtaggtggcgagtttgattttcttttccggattaaacgtgtttaccgctttgatcaaaccgatggtgccgatgctgattaagtcctcgatattgatgccggtgttttcgaatttgcgggcaatgtaaacgacaagacgtaagtttctctcaatcaggatggcccgcgccgcctgatccccgctcggcagctttaataagagcacctgctcctcttctttagacaaaggcggcggcagcgcctcgcttcctcctatgtaatacacttcatcgcttttcagtccgagtttcatcagccatttataccacaaatatgtcagacgcagcttaagttttttcatcttcctcccccttctaaataccacgcgttttgagtatgatgaataacagacttttcgtcaggaaacatgttttacagccttccctgtcagcatcttcggatgaacgattccgtcaaattcaccgtcagcggataatggcttcgtgctgatgccgatcaggcatttttcacatgcgatcatctcgtcttttgttaaaatcgtgacgtaatccggctttaaacagagtaaaaattgattgtcctggccgacgcccctgtatggaatcagcctcagcttatccgcatggcggaacgaatcatcaagctgctctatcacttcaagcggactggcggatttgatgaagtccgtttccttttcgctgaggatcggagcgaatttgttaatgtgaaggatcatgaccggcgttttcgtcagcggatcatacagctgattcccggaatccaccaatcctttcgcgcggattgtctgtccgctgaattccgcctgcaccatgacaagttcatcgtactgaatggacttcgtctcgatgtcttcaattctctttttcgaaaaaaaccatatggccggaaatccgataactacaaacatccagctgatcgggtcgccgaatccggtctggcttgtaaccattacgccttgctgcacaattgattctgtctgcagcagggaatgtacgccgatcattcccccgccgacgagaaaagtcgcgaaataaaaggcgaacaaattttgaaaaaagtatcggaaccgtttaaagccaaaagccgtaagcacgatgactaccgaaaacgccatttttcccgccggatgctccacaaagggagaaataggcgtaaacatcagaagcacaatggctgacccgatgaaaccgccggcggccactcttctttttttcacctggcgttttaaaataaaggcggtcaataaaagcaaaagagaatcaaaacaaaagttcaacagccaaatgacatccagatagattttcacatctgacccctttcctcttttgtcttacatatctgtttctctctcttgtttcataagtataaagcaagctctgtgggaaagtctgtcaattaatgttgagggtaaagtacaatttttaagggataaccgttttatttgtcgagggccgaaaaggttgattttctattgtccccttcaactaaaaaagcgctgccgtgatttggcagcgctctgtttttactcattgatataaagttttcctttagccgtctgtctcgtttcatttccgtagtcatctcttgcgataacgtcaatttttgctccgcttgctttgatggaagaagccgccgtccagtaaccctcatatcgtcccggagaaatttctctcagcggaagctctgttgcgttttggctccctgcccgggcgtttgtcagaggcagacggatcacgaaggaagcgtctaatttctttccgcttgaaaaagcgattttcactgattctccggcttttaattccttatccgctccgggaaccaatccggaaatgacgggagcattgtaattgacatcgattaccgtctttttcgttgttttgttaccagcttcatctgaggccgtgaccttgatctcattgctgccgttttccagaagggttctcgcttgataagaaccgttatttacttcagctttttttccgttcacctttacccattttaaatgggcgtcgtgcacttttccttttacagtcactgcttctttatttgttttatcaccgtttgccggactgtcaatcgtcacatcaggcttatcctcatccagtatgaccgtgacagggcgtgactcgtcggttgacccgctgtctgtcacagatgccgctgtcagccgattgccatctttagtgagtgtgacaccggcctggaaactgccgtctgcatctgctttcgtttctgcggcggttttaccgttattggtaagacggacagcggtttttggtgaagccgttcctttcaccgtgattgacttcttgtttgtaaatgaccggttttcaggcgacgttatctcaggcacagaagcttcgtagtcgaccaaagccctgatcataaagtttccgtctgttttatcggcttttgaccagcggccgtcgaggtattgccagtttctgttcgagtacgggctgccgtcatcagatgacagggcaggtgtataaggatcgggtttcgtctgacggaacacaagataaaaatcctttccgaccgcgattccttttgagctgagatccactttggtccactcgccgtttcgaagcgcttcagcttggaacgggccggcaattttgctgcccggagctccatcagggccggatgcatcatatacttctgcttgaaattcggtaccgcccggatcaggccagtcggcgccccaaaatttaaaaaggcctcccgtcagcataccgtgttcttttccgtctttgagggtcatcttaacggcagatttgctgccggctttaaaatatgacagcgcggcttcttccgtcccgttatcataggcgatttccccttcataaccgacatacggcttaagcttgacgtttttttcagcatctcctttgatgtcgacagaaaattcgctattgtaaaagccttttgccgctactttgattgtgtaggagccttcatacgccttaagcgaatattcccctttatcgtttgtcaccgccggctcaattgcggcatcctcggccacataaagcgcagccccttttaccggttcgcctgtggactgattggtgatggttccttttagcgtgccggacggcatttgctccagtgtaaagtctgcctgtgcggttttgtctgattgaatagaaacttgtttcgaagcggacttaaatccgtaagcctcggctttcagcgtatagcttcccgccttatgtgacaggctgtaacttccgcttgcagggtcggaatatacggatttccccgtctcggcgacactgatttgcgctctgagcggcaggaggtttgtttcacgtttcactctttttccgggtgatttcactgccggtttggcctgtttcggactgatggcttttttcttcaggtggccgggaggtgtttgtctattgtgtttactttttttagccgccttgccgagagggctgcttgaaagccggatatcatcgatataccatccgtcttcattgagtacttcgtcagactgcatattaaacatgagctttatgttttggcctttatacgcagataaatccgcctcttcatcattccatcctgcggaatcaccattgtaaacggccgcctgctcccaatttgatttcccttccggcagaacgaacacatacccgtaatcaaaaaattcttcgagcttgtgccagcttttaaattgtaaaaacagccgccctgtttccggaacttgaatcggaggcatcacgagattcatgttggccgaatcggcataagggccggacagattcgtcgcatacactttatctccggaaaatgcggcgccgggccctgaacccgggataccccattcccattgatcatgtgtcccgtaactggaccagcccgccggctgtgattcaaaatcctctttgtatcccgccgtaatgctcggtttcacgtcagcccggtacgtatcagattctacagaatgacctccgaaatcttttatggtccatttataacttatcttgcttcccgttatgtccggaatctccgcctggtatgttccctttttttcatcaccgcttttttgaacggcggctgtcgttttccactctccttcatcaaactgataggagaggatcacctcagttatgcttacatcatcttctgctgtaaccgttaacggaaggtttgcccctttgtaagcctctgagaccggttcatgatgaaagctgggcggattgtgatcttcacccgcagaagataccttgccttctacgcttccgattccgtccgttacggcagaaacggcatcaaaagcgttaacgaggccgtggccgtaaccgttattcggtgattccggaaaaacggaatctgtcagcttttcggcggtgcgcgtcagaacgtcttccatttcatcgaccgtaatagaggcgttcgcctgccttaacaaagccgccgtcgccgccacatgcggcccggccattgaagttccgtcccagccgccttcgtatgttcctccaggaatagaagaacggatattcacgcccggagccgaaatgtccggttttgtttcatgatacggtgagggccttgaagtgagaaatcagcgagtttcttgtcgatgtcagtcgcacctgtcgcaaatgcttcaggataattggccggatttgcgattgaacccggtcctcccggtgtaaataagtcttcatttcccgcagagaattccggaaaaatccctgccgctctccacgcattcaccatatcgcggtaccactcgtccattcccgaaccgcccgcccaggaattattgacaacatccggcgccatctcgggatgcggcgtgccgtttttatctttaggcgcaagcacccattcaccggcatccaaaatatcggcatcggttcctccgtcatctgaaaatgcttttactgcgatccatttcgcccccggagccacaccgatttgatttgagccgtcaggttctgaacccgtcatggtccctgttacatgagtgccgtgttcaagatcgtcgtagggagcgtctttatgggacacggcatcataccagttcatttcatgattcggcgctgctggattttcaggatcgtaaccccggtatttttccttaagcgcgggatgatcccactgaactcccgtatcaatggaggcgacaaccgtgccggttccgtcgtatcctgaggcccaggcctgcggcgcatcaatttggctgatattccattcgatgccttcctttgctttgacctctttttgttttttcttcatttgaaaaggagcttttgattgccgttgagtaagctgacgtttttcattcggaagaactttttctacttcaggaaatgaggcggctttttccattacctctttcgaagcagtaactgccattccgttgacaatataataggaatggatgtgatcagcctttcctttctttttttgtttttccaaatatgttttcagattctgctgcgcatcatgagctgccagttttaaagaagaaacaacggctgaccgcttttgatattcggtttttgctgcggaaagcgaatgagactcggcatttttttctgcttctttgaccgcttttttcgtattggctttctctttaaatttgataagaaacgtgactttatcatttttttcaaaacgcttcttgactgaatcggaaatcttatgctgaatgctcttagaggaagaaagatctttggtaaaagaaactgcccccggtgtgctgttcgctccgactgcccccggaaacaacagtgaactgacgacaatcgcgcttaaaacggagcctgtccatctgtttctcgtttttttcttcaatcgtatccccccttatttggtaacgccctataaaatgtgtatccctccttcataattggaatcgtttgtcatttcgatgctgtacgttaaatgtagacaatcttccatccagatattgtcacattctgtagaaagccgtatgaaacttaaaaacaatcaattcgtcataggtataaagcttcttttttcactgtatagatcatgggggataggaaggaagactgtgcacaaaaaagaaaaaggacaaaaccatgtggtcttgtccttttttacatcagccgcgtttgttgcggtttcttaaaaatgtaggaatgtcgagggcatcatccgccggttgtgatgtatggcggttcaccgtgttttgatgctgtgtttcttctcgtttcggctcacgtttcgcagcattttggctttgagacttcaatccttggtttaaagtcggacgctgcggttttgagtcatctttttcctgttcgataaaaccggtcgcaataacggtgacgacgatttcatcttttagattttcattgataactgaaccgaaaatcatattgacatcagggtcagatgcagaagcgacgatgtcggctgcttcctgcacttcgtagaggctcaggtttgtacctcccgtaatgttcatcaaaacaccttgcgctccgtcgattgccgcttccagtaacggactggagatcgcctttttggcggcttcagcagcacggctttctcctgtagcgatcccgatacccatcaatgctgaacctttgttggacatgatggttttgacatcggcaaagtccaagttgattaaaccaggcgttgcgatgaggtcagagataccttgcaccccttggcgaagcacgttatcagcttcacggaatgcttcaagcatcggtgtgtttttatcgacaatttcaagaatgcggtcattcggaataacgatcagtgtgtcaacggcttctttcattgccgtgataccgcctgcagcctgcagctggcgttttcttccttcaaatgtaaacggtcttgttacgacaccgacagtcaaagcgcctaagtcctttgcgatttgcgcgatcaccggtgcggctcccgttccggtaccgcctcccattccggctgtaacgaacaccatgtcagcgccttttaacgcttcttcgatttgttccttactttcttcagcggcttttttgccgacttcgggattcgctcccgctccgagaccgcgggtcagcttttccccgatctgcattttcacttccgcttttgacaggttaagagcttgcgcgtccgtgtttaccgcaatgtactctacaccctgcacttcattttcaatcattcggttgaccgcgttattaccgccgcctcctactccgattactttaattgatgctaagccgtctatgtttgtttcgaaatccaacatgctaaatcctcctaatctgccgaatgactatcaatctattcccaaaacatgcttaatagttttttcattttgctcggtttgttgtgttcggcttgtgttttttgttttgcttttggacgctgctgcgcctctggccgctgatgatgttcttcttcgtgagagaccgcgatttcctgcacggcttcttccggcatatgaaagcctatttttcttccctgaattctggcatttcggcaggcaaattgtatcaagccgacacccgtcatatactgagggtctcttacaccgatataattcgggcttgcgacccttacattgtgcctcagcacttcctgtgccaatgaaagcactccgggcattgcggcctgtccgccggtcagcacaaagccgccgggcagatctgtaattcccatatgctcaatttcggctgcggcaatctcaagaatctcttccactcttgcttcaataatattggcaatttcctgctgtgtaaaagattgcttttgattcgttcctatgacggtgacttcaaatacttcatcttctgaagcctcatcgtagaatgcatgtccgaattgtttttttactctttcagcctcttcggtggaagtgcgcaatccgatcgatacatctttcgtgatgttttcgcctccgagcggaatgacggctgtctccttcaggtgccctgttcaaataccgccaccgtcgtcgagccgccgccgatatcaatcatggcgactccgaggtttttttcgtcttttgacaaagccgccgaaccggccgcaagcggctgcaggcagatatcagtaatttcaacgcccgctctctccacacagcgaagtaaattatgtaagatcgttttggagccggtaatcagcgtgccttctacttccaggcgcactccgagcatttttttcggatcggtaatttcgtctcttccgtcaacgataaactgtttcggaacgacgtcaacgatcagctgctcatgcggaaccgacacaacctgtgccgcttccattaccctgcggacgtcttcaacgtgaatttctttgttttcactggaaacagcgacaacgccgttcgtatcttgaatatgaatataatttccattaacgccgacaatggcttttttcagcggaaaacctaccattctttcagcttggtcaaacgcttttcttatagaatgaacggtttcatctatatcaacgattgagccttttttcaacccttcagacggtacatttcccactccgataatgttaagggaatcatctgtcatttctccgacgatcacttttgtattggacgtaccgatgtcaagactgacgtaaagttcattgttgttcattctatggcacctcctcacatttcgatcaaattctattctattatttgcggaacaacaatacaatgaatgtggctttacaagtgtgtaacaaaaacaacagcatcaacaaattcttatctgatttctcacaatttatgtttaatgaaactattcgttatattctatgtatatcctcttttatatcgcattttttttattttttttagagacggcccaccttaccgtaagatttcctgtcacggtgccataatgtgcaaaccagatgcaaatatacccgctttccattagtctacactaagatgaacctccagaaaagctatagatattgccagaaacatccgaaaaaagaagaaacaggaggaaaattccaaatgcaatgttcattgaagaagacacgcccattgcattgagaattttccccttgtccggcagccatatcccgggcaaaaacaaacatagtcataattattccgctatcggttatatcggctgccccgctgattgtaatagattcttttgaatcaccttaaaattagttctttagaactattaatcattttcttttttcttgccggatttacctttgttaaattcttcaaaatacgtagcgacttctaagtggataatcccctttttcccgccgtccagctgggaaacgatagaaggataggtcttcatccggtcggcaaatgttttaatagaagcggtaactacatacccgtcgttcatatacagcttgatccggtcctggtccatttttaccggtgtataatagatttcagaaatcgactgctttagcgaaccggaaagcttatcaagctgctccgccattttgacccgctttttcgcgtttgtccagtcaaccaaaatcgggcccgcgtcatccggcgtgacttcgttcggcagcacggtgccgttctccagcacttcataatacacatcattccgctgcagatacgcgatcgtcttgtattcttcaatgtgaatgctgactttattaggaaatacttttgaaagatccgcctttttcaccagtttattctgctcaatcttttcttctgtttttttcttgttcagactccagaactcggtttgtccgttatgtatatcagaaagcgcgttgatctcttttacagacacgttttcgttcccggaaacggtgacagaagacactttgctgatcggcatctgcaagtacacgatgatcagcaccatcataaaaaagagcacaatgaatgaaatcagccggcggtttgctttttgtttccgctgctctttgattttcggaatccgctcttcaatatttacgattttttctctttcatgatttgggttcactgcctgtccacctcactaagaatgaaacagcttgacattcgtctgattgaaaaacaaacggcatgctgtgatgccgtttgacatttgttaaaagtatatcacatgagctcatggaaatcagagaaccttttaacgattccctccgatgatttcaacttccgtatgcatgtcaacatcatactgctcacggattgtctttttcacatactcaatcaggtcgagaacgtccttggcagtcgctccgccggcattgacgataaaattcccgtgcatttcggatactttcgctccgccgatctgatgtccttttaatcccgctttttcaacgaggtttccggcatgattcggcagcggatttctgaatatgcttccggcgcatgggcttgaatacggctgcgtattttttctgtaatctttgttctgctgcatttgcgccgtaatggcttcccgttccttttgctcaagctgaagaactgcctcgagacagacgccggggcgttttttctgcaaaacagacgttctgtagctgaaatccatctcttcgtttgtcagccattcgattgtgccgtcttcaaataagatacgcgctttcacaagaatttcactcatatcagatccgtgcgccccggcattcatatagacggccccgccgattgatccggggatgcccgctgcaaattcgagaccggacattccttttttactcatggaagtcgcaagccggacgaccgaatagccgcctccgaccgtcacctgatcaccgtcaatctccaaatgatccagacccgcgcccagtttgatgacaactcctcttatgccttcatcaagcacgagcagatttgaaccccggccgataaccgtccatggcagatcatgtttcttcacaatatccataatatctttgaccgcttccacactgttggggatgatcaaaatgtccgccgggccgccgattttcatcgttgtatggttcgcgagcggttcttgttccagcactttgccgacttcgcggtctcttaattcctgaattacgttctccatcataaacctccgcattccatttgctctatttttttatgtcttccatgatactgtacagtctggctgccgcatccggaacaccgagtgattttgtccgctcactcatgtcttttaaggtttcttcattcatgacgattttgtccagcgcagcgatcagtttttctccgctgagctcggtttccttcagtacgattgcagcgtcatgctggctgagcgccttcgcattgacttcctggtgattggctgtcacatacgggctcggaataagcacgctcggaatgccgagagcggtgatctccgcaatcgtcgtcgctccggctcttgccacaatgacatcaattgattgtaagtactccggcatttggtgcaaaaacggttttgtcaccatattatcagcggcttttccgcctttcagctcagccgttaccttctcgtaatgcacttccccggtaatataaagcacttggtaaggtctcgttttcaattcttcctgcatatctatcacggcacggttaatgggagccgcgcctctgcttccgccgaaaatgagcaccgttttttgattgtctttcagcccgaactcagttaatgagcggcctgtcttaattgagacgacttcagaggctctcgggtttcccgtaaacacaactttttcagcaggaaaatgcgattttgcttcttcaaagcaaattgccaccttattaacatatttcgagagaaacttatttgtgatgccgggcaggctgttttgctcatgaatgatcgtcggaattcccatttttgccgccgcgtatacgaccggaccgcatacatagccgcctgtaccgataacggcatccggtttaaactcttttaaatatgatttgcttttcttcacgccttttaagaaacgcatgacggtttttacattttcaaaagaaagttttcgtttgaaacctgtaatttcaatggcgcggaacgggatattttcccgttcaacaatttttttctccagaccgttctctgttccgatatacaaaaattccacatccggatgccggcgctgaacttctttaataaaggccagggccggataaatatgtcctccggttccgcctccgcttactgcaatacgcattcgtatgtcccccttaatcacatagcgataaccctgttttttaggacagggttattgatgttgtctgtttttttatagataacgaatagatcatgagtgatgaggcaagatacagatcaatacctcgagtaccggctgacatttaaaagcacgccgaccgctgcgagcatcagcgtcagtgatgagcctccgtagcttaaaaacggcagcgtaattcctgttaccgggatcagccccgtcacaacgccgatattaatcatgacttgaatagctatcatagaaataataccgatggcgacaaagcttccgtataaatccggcgcgccgagggcaatcctgacgccccgccacaataaaatactgaacagcagcaatatgagcgaaccgccgataaagccgagttcctcagataaaatagcaaaaatgaaatcggtttgcggctccggcaggtaaaaaaacttttgccggctttggccgagccccatcccgaacagtccccccggacctacggcatagagcgactgaatgatctgaaatccgcttccaagcgggtcctcccacgggtttaagtaagaggtaatccgtttaatccgataaggagcggacagaacaagcgccgcaaatccgcttaaaccgatgagtccgaggaacgcaaaatgagcgattcgcgcaccggatacaaaaatcatcacgatgcacgtgcccaccattaccgtccccgttcccaggtccggctggcacataataataataaatgcagaaaacacgattccgagcgcgggaacgaatccgcgtctgaatgacgtaatattcttctgtttttcagaaagaaatttagccagaaacgcaatcatcgcgagtttcataaactccgaaggctgaatgctgaacgctcccactccgatccagcttcttgaaccgttccgcaccattccgactcccggaatcagcacaagcacaagcagaaaaaaacaaatgatcagaagcagcttcgaccatgtgcgccatgtccaataatccacattcataatgaaaaacatggcaatgacgccgatccccgcaaacagcagctgccgtttcgcgaagaaaaacgagtcgtcaaatttataatccgcccataccgcacttgcactgtagaccataattaatcctattgttaaaagcaataacgtaatgataactaataacaaatcaggcgctgtttttttagtagtcaaagcaatcgacaccccaagcataagtcatttagggctgccgatgaacagagacaagcccttacttaagcatatgcacggcatctataaacatgtcaccgcgttcttcaaatgttttgaactgatcccagcttgcacacgcgggtgacaagaggatgacgtctccttcatttgagagcgcaaacgccgcagatactgcttgttcaacattatcgacacgtttgacatgttgtattcccagctcattgcccagtttttctatcttcggcgctgtctgtccgaacgtcaggaccgctttgacattgtccatatacggtttcagatcgtcaaaaccgttgccgcggtccagtccgcctgcaagcagaataaccggtgctttgaacgcggagagcgctttgcttgtggccaaaatattcgtcgctttgctgtcattataaaatttacgattccggattgctgttacatactgcagacggtgtttgacaccggtaaagcttgtcagcaccttctgaatcgctttattagacgcgcccgccgtttttgccgcggctacagcggccaatatattttctaaattgtgcgcgcccggcagcacgatgtcatcaacaggcagaatcgcttcatcgccgaacatcagcattccgtctttaataaatgcgccgcttgacagttcctggtgcactgaaaacggaacggtgccggcttttccgctttcggcaagccgcacgactgtttcatcgctttgattcacgatggccgtatcactctcaagctgatgaagatacacgttctgcttggctttttcatagttttcacggctgtgatggtaatccaaatgagcgtcgaacacatttaaaatcaggccgatttcaggtctgaacgcatgagtccccataagctggaacgaagaaagctctgtgacgatccattcatcaccgtcagcatgataagccacttcactggcgacagtgccgatatttcctgcgatcagcgcctttatcgagtcagctttcagcatttcataaatcagggtcgtcgttgttgttttcccgtttgaacctgtaatgccgatgaattttgcattggtgatataatacgcaagctcgatttccgtccaaaccgggatgcctcttctttgcgcttcctccaccatgatattttcatacgggattccgggatttttgatcagaatggtaatgtgatgctgatcaaaaagtgacgtcggatgctcaccgcagatgacctcgattcctctttctgaaagcctttgggcaggttcgttctcttcaaaggctttttgatcattcacgacgacgttaatgcctttttcatgaagaatcgacgcagccgcatatccgcttttcgccagtccgaggaccagaaagttttgttttcgcaaaaaaagttcgttttccacttataaccacacctcgatgtaaattcctaaaacggcaagcagcagtcccgcagtccagaatgtgacgacaactctccattcagaccatccgaccaattcgtaatggtggtgaagcggactcatcttaaagattcgttttcctgtcgttttaaagctgatgacttgtaagataacagataaggtctcaataacaaaaactccgccgataatgacgagcagaatttcaagcttcgtcagaatggcaacggtcacgatcgctcctccgagcgcaagcgaaccggtatcccccataaatactttggcgggatgggcgttgaatacaagaaaaccgagaacggcgccgacaacggcaaccgagaaaatcgcaacgtcatattgtgactggttccacgcaaggatggcgaaagcgccgaatgcgatagccgcggtaccggacaagagaccgtccagaccgtctgtcaggttgacggcatttgaacctccgacaagcataaagagaacgaggataaagtatccccagccgagatcgattgacagatgtgtgcccggcaccctgatgccggttgaaaaatggcaataatgatatactccgtaaaatacaatggcaataatgatctggccgatcaatttctgcttcgacgtcaatccgagattccgtttcattactactttaatatagtcatccagaaagccgagcaggccgtatccgatcgtaacaaacagcagaagaaacatttccgcgctcagatgcgaaaatttctgcgtcatgacaatcgccgtaatagcgatggatacgataatcatgaccccgcccatcgtcggcgtccctgattttttcatatgtgatttcggcccctcttccctgatactttggccgaattttaaacgtcttaaaaacgggataagaatcggagatatcagaacactgattaaaaatcccattattattgtaaataaaatcacttgctcaagcattgctcttttctcctcccgtttcgttcaaacgacatacgtatttatcatattcacattgtgtccccgtaattcttttcatttcactcattctaacactctttcctgttttactttttattcagctcaacaatagctcttcccgctacttcggcgtcatcaaagtcgaatgtttcattgccgatctgctgataggtttcatgccctttcccggcaatcagaaccacatctccctttttcgcgttggcaatagcaaaaaagatagcctgctcgcggtttgcgatactgtgatagtaggtgccttctacccctctttccatatctcttaatatggccagcgggtcctcgcttctcgggttatctgaagtgaaaatcggttcgtcggcaatccgcaccgcaatttccgccattttcgggcgtttcgttttatcccggtctccgccgcagccgacgacgacgaaaagcttgccctctgtcatgtctttgcatgtattcagaacgttttccagactgtcaggcgtgtgcgcgtaatcgacgaccacaggaaacggctgattatgattcaccagttcaaaccggcctctgacaccttgcagctcttcaagagcgctcgtgatcgtatcaaacggcagacccgctgcgatcgctgtcgccgctgcagccagtacgttatacacgttgaagcggccgacgagtgaaaccgtgatctgctttgttccttttggcgtaacgagttcaaaatttgtgccttgcgcagagatctcgatttgtttcgccatgacatcggcatcgttctcgattccgtatgtaaggatgtgcgccgccgtcactttttcaaaataagcactggctttgtcatctgcgtttaaaacggcccgcttcggcttttcatggttaaaggagccgcccagctgggaaaacaggaggcttttagcctgtctgtagtcttccatcgtcttgtgatagtctaaatggtcctgcgtcaggttcgtgaatacggcgatatcataatcgcagccgtgaaccctgccgagtgacagagcgtgagaagacacttccataatagctgtgtcaacatgctcatcattcattttcttgaacgttttttgcagtgtgacgctttcgggcgttgtatttttgaccgggaatgtctcatccccgattttaatgtacatcgttccgattaaaccggtctgtcttcccgcttttttgaaaatctcatcaaccatgtgcgtcgttgatgttttgccgtttgtgccggtgatgccgataagctgaagctgctttgtcggctgcccgtaaaacgcgtcagaaagaacgctgagcgcccgctgtgaccggcggacgataatgacaggaacatcgacgtcaagctctttctcggcaacgatggccgctgcgccgttttctgcggctttttgggcgaaatcatgtccgtctaccgtatacccttttatacacacaaaaagactcccttttctcacttccctggagtccatctcaattgaagttatgtcagggtcatgaaagtcattttgaacaggttcggccattaaatatgtaagcagctttgtaagtttcattgtatcaaacctctcagaaattctattcattcttttatcatgataaccgtttataaaagtcagaatggcttttaaacatacagttcatattttagcgtaaataaaaggatacatccagttaatcttaaaagttatcttctttttttctctttatgataaaaggcagccgaaaacaatcggctgcctcaaaaagactcattcttcactcaagtaaacacggatctttgagccttcttttactttcgttccggctgcaggtgattgtttcacaattttgcttccttttcctgaggagtcaatattcaaattgacaagcagcgactcaagatcagagacagacatccctacaacattcggaacctctattgtttttgtgtcgttccattgatattttttctcgatttgattttttcgcggtttcacgccgagctccggcagactgtctctcatcatatttccgacaatcggcgcggcgacggttcccccgaattgaatcgtgcctttcggattatcaaccgcgacatacacgacgaggctcgggtcatcagccggcgcaaaaccgataaaggagacgatatggttgttttcgagatatttgccgtctttgaccttttgtgcggtacctgtttttccgccgacgcgatatccttccacgaaggcattccgccccgttccctgagcgacgacgctttctaaagcatatctgatctgctttgacgtttcctgggaaataacttgccttttcgcaatcggcgattgtttcttaactgtttttttcgtaacgggatcaacccactctttggcgataaacggagtataaagcgttccgccgtttattgctgcggaaacggctgccacctgctgaatcggcgtgacggaaaccccttgtccgaaagcggttgtcgcctgttcgaccgggccgactctgtcaagcgggaataaaatccccgttccttccccttgcagatcaatgcctgttttctttccaaagccgaagtccttaatatattgaaacagcttttgttttccgagccgttcccccagctgtacaaacccggggttgcaggaattttgaacgacttcaagataagattgcgaaccgtgaccgccctttttccagcatcggaggcgggcgccgtcaacctcggcaaatcctttgtcataaaagtggtctctttgcaagtttactttttgctcttggagagccgccgcaagcgtaataatcttaaaggtcgaacccggttcatatgtgctccataccggcaggttccggttgtaaacggacggatctacggattgatagtcagccggatcaaaatcaggacggcttgacataccgagcacttccccgtttttcggattcattgcgaccgcaatcattccgtccggattatatttcgccgctgcattatcgagctctctttctataatcgtctgaaccttggcgtcaatcgtcaatttcatatcaagtccgtctttcggaggggtgtaatcatccgcttcatcaggcattttcttccccttggcatccgtataaaatttcactgatccctttacaccttttaagtcatcatcataataagcctccaatccgagaaggccctggttatcaatacccgcaaaaccgagaacatgggacaaaaagcttccgtacggataatggcggatgctgtcttcagccacataaaccccttttaagtcgagcgctttgatttctttcgcttttttattggaaattttccgcccctcgggtgagattttttctatggaggttttcttagtaatgtgtttgtagaccttctcttccgacatatttaaaactgacgcgagaagcttgcccgtttttatgggattttgaatctggcgcggtacgacaaagacggtcggcgcgcttttattcgtagccagcttcacgccgtttcggtcaaggatttctccccgctcaggctcaaacggcaaattccggctccaggaatccttagccagtgaagtcagcttttctcccatcacaaattggacatagcctaatctgctgtcaatgatcaaaaaaatgattacgccaaaaagcaaaaccagtaataaacgttttcgaaccgttacatttgaaacgcgcaagggaccgtccactccttatttaggcttgtttcaatttatgcctcagcttggacacatagaacggcggcgcataaaaaagaagcccgcgggcatccgcggacttctctgtcccgttaatcaggatttttaaatttcaccttgatcacggtattttctttcagttctttgccttttttcacactttggcttgaagcgtaaccttcaccgctcacatcgatgtgaatgcctgatactttgctgaattgaagcacttcccgtctcgaccatccggacatatccggcatcgtcatctttccgtctgtttttaagaagattttctgattggtgatcacatcttctccggctgtcggatactgctcttttacggcaacatcgctgccgatgacaatcggtgtgagatgttcatttttcgcttccttctcagcgcccgtgactgtcttatctgtcaggtcaggcatcttttggcttttcgtttcttcctgaccggaatctgttttttccgtcggttcgatattcatgtagtggaggctgtttttcatcgtcgggttaaagatttccgcgacaggatcagagctgctttgacccgcttttaactgcggctgctgcacggctacatagatgacgagcttaggatcatttttcggcgccatgcccatgaatgaaaacacatagttgctcgttccccttaaatatccgcctgtcccggcgatttgtgcggttcccgttttacccgcgacgtcaaaaccttcaattttataaggttttcccgttccgatgtctgacgtcacgacttctccgagcaggttccggacttttttcgccgtatcggctgaaatcggcgtgccaacttgctccggttttgtctgcttgacgacttttttcgtatcggggtcgacaatatgatcaatgacgtaaggtttcatcattttgccgttattggcaatcgccgtgacggcctgaagctgctggatcggtgttatcgccgatgcttggccgtaagccgtagacgctttgtcaaaatcatatttgtagttaattttacttgatacttcaccgggcagatcaatccctgttttttgatagagcccgaatttgtgcaggtactcattaaaccggtcaaaccccagtttttcgttggccagtttggcgaaagcaacattcgatgacctcatgaggccgtcatggaagcttgtcataccccatccggcgccatcgttccaatctttaacaggtttgcctcccactttatatgttcctgatttatatttctcgtttgcggaaaacacattttcctgaatcgccgcggcaagcgtaaagatcttcatcgttgaacccggttcatacgcgtacgacactaagtcgttgtaataattggtgacgtttctgatattcgggtcaaaactcggacgctgccccatcgcaagcactttgcctgttttcggttctacgacagccgccataatttttttcggtttatatttttccgctactttcgtcatgctgtcttctagaaaggtttgaattttctgatcaatggttaaatatacattgtcaccgtttttaggtgcggtgattttttctttgctgttcggaagtttccagccggatttatcactttcgtaagtgacggacccgtcacgttccgtcagatagttattcagtattttttcaagtcctaaagagccttgtatctcgtttgttttttcattcacatcggcatagccgagaacatttgacaaaaatatgccgttcggatagtagcgcttcgtatctcttaagaaagaaatacccggaagatccattttttcgatcttttgttttttcgcataagagatatcgcggccggctgaaccgaattccacctgcttcgcgccattcctgtttaagatgtccagaatctcgcttttatcaagattgataacggtcgccagtttttccgccgttttctctttgtctttgacatgctgaggatgcttcggatcactcgtcatttttttatcaagcacggcaatgagcttatatgtcgccgtgtcctctgcaagcactttgccgttccggtcaagaatagagccgcggctcgcttctatcgtccgctttttttcgtgctgctcggtcgcttttgttgcaagttctactccgtttgctttaccggttaattgaatgtacgccattctcccgagaatgacaaagaaaaagagagcgaaacaaatactgagtatcgctgctcctctgttcataaacttattttttttcggcatgggttatcattcctgtatgtttttcacttttttatctttcagattcaaaccgtgctttttagcgatatccatcaggcgctgcggctggcttaagtcagcagccgtcttttcgagatcaccgatctgcttattcttctcagatactttctcctccagtttttgcacctcaatattggattggtacgccgcgtatgcctttgatacgataaacattgatgtggagagaacggcaatggcaaacaggacgagcagcaccttttccccgagtgtaatggaagccctctttttgacaatcacctttttttcgggacttatcactggccgttgttgtttttcctgctggtaagctaagttgctcataggctgatgacctcctttaatgttgtcatttgctgcccgttattttcgtttctccgcaatgcggagcttcgctgaccgggcgcggttattttcttcaagctcctcttttgatgccgtaatgggctttctcgtaatcagttttaattccggttcaaattcttccggtatcacgggaagacccggaggcagttcgggaagtgatgatttttccttgaatgtcgtcttgcacattctgtcttccagcgagtgaaaagtgatcacagacacccttccgcccggcttcagcacctctatcgcttgcaagagggcctcttcaaatacctgaagctcgtcgtttacggcaattcgaatggcttggaatacacgtttggccggatgacctccgcttcttctcgccggagccggtatcgcgtcctttattagatcgaccagttggccggttgtttgaataggcgatttttctcttgcctcttcaattttccgggcgatctgcttgctgaatttttcttctccgtatttaaagaaaatcctcacaaggtcctcataccgccattcatttacgacttctttcgccgtaagggcggccgactggtccatcctcatgtccagcggtgcgtcatgatgataactgaatccccgttccggtgtatcaagctgcggagaggatactcctaaatcaaataaaattccgtcgacactcgtaatgccgtgttcatgtaaacactcttttaaataacgaaagttgctttttaccagaatgagctgtcctttgtattcggacaatgttttctgtgcgttttcaagcgccgtgtcatcttggtcaaaggcgatcaggcgtcctttttccgataattgctgcaataaatatgtactgtgcccggcgccgccaagggtgcagtccacataggttccgtccggtttgatatttaaaccgtcgacggtttcacgaagaagtactgtcttatgctgaaacatttgtgtcggtcccacctttatcaggaatgaattgaattgtcagttgttgttgtgatgcacgaagatccattatatatcaaatccaatcatgttttcagcaatttcagcgaatgaatcttcttgctcttctgtgtattgttcccatattaccttactccacaattcaattcgattggaaaccccgatgacaacacattctttttccagttttgcgtaattcagaagagatgacgcaatattaacccttccctgcttgtccagttcgcattcggtcgcaccggaaaaaaagaatcgggtaaatgcgcgggcgtcttttttggtgagcggcagagccttcagcttttcttcaatcagcttccattcattcatcggatagccgaaaaggcattggtcaagtcctcttgtcagcacaaactgctcaccgaggccttctctgaattttgcgggtacgatcatgcggccctttgcatcaattgtatgctggtattcacccataaacatgataaggacccccactttctcccctaaactcaccactatccgccacttctctccacaacctcattttacactgtttacacataaaaaaaaaccctgaactattcagggttctttaaaactttatttcaaagtttgacaatctgatgttggttttgaaaagaaaatggcagatgtttgaaggttgtgaagaattttggaccataacggttcaaataatacattacattccaaatccgttcctgcggagcgccgagcggtctgatgctgttttggattctttcatagtcacgcagcacaaaaccttctttttcttcaattcttttcgttaccgtccgttctaaaaacaagagctgatcctgaatgaaggcggcattcttctgtaagagcggctcaaggcttgaatcgaccttcagcgcttcgttccttgcgcttttatggacagcttcaatctgcgacttcgcctgttccattacagaagaaaactcttccggaatctgctcttcaaaataagcgtctttcaggtgtccggtgccgtgttcgatcgcttcctgaagcggaatattccgttctgaaagcttcttttcaatatggcgctcaagaatcgtaatgttcagtctcggcactaccggcgtcatgcggaagcccattaatgagaaagcctgcttcagctcaccccaataattgatctcccccggtcccgcgataaacgccagagtcgggatgagaaactcctgcataagcggccttgtcacaacgttattgctgaaacattccggtttttcttccatatgggtatgaagctcgtcgttcgtccacttcaggtcaagctccttaatgacaaaaacgccgttttctttttcaattaagaaacgctctccctcgtgttcgtaaaacagattagcctgatctttgtccgattcaataatcgggtgataaccggcttcccgcataagacgctgctggtctgacacggctttgacaagctcgtgattgtgttttaaaatctgctgaaacatacccgtttccagctttttaatccccggatctcccgaattcatcagaataaggccttcttcttgaaacaagtcggcgatcaacagctcaaaaaagtccgtgaatgtctctgatgagcgtaaacatcgcttcacgttttgaaggagtgtgtttgtgtgatccgtttcctcaaaagcagcgaacacttcatcaatccaagccgcgcatttttcctgatcaagctcggttttagccgccgatgtttttttccagtacgactgcggcagtttccgcttcaccggacctttattctctgttgacgtatgcacataattaatttcttccagatcgtgatcttcacccgccacccagaaaatcggagcgacaggaatctgcagcgcctcttcctgctgtctggcaagtacgataatggagataattttatgtatggtgtaaagaggccccgttaaaagaccggcctgctggccgcctacaaccgctgcgctttttggatctctcagtttttcgatggaggcctgcatggcggcggagtgaaatttttcgtgataggaggataaataatccgctaattcctctctggcaaacggccgcgaagagaggtcatgaagccgcttttgccatacgtcctctgaatgaatatcataatcaaaaaatgaagacatgttttctccatctatatagtgctgcacaaacttattttgacttttgatggaaagttcagttagctgcatctgtctggaacttcctttctccaataaatagttaggtttccgaaatgagtatagcatgttaccggaaaacctcaaaagactttgtttcaatttctttctaacgcttttatgctgcggtgtaaaaacgtgagatgaacggccggcaatccgcggctttccgcttcttttacaaggtagccgataatcgcatcggcctcggtccgcctgcctgccatgatatcgacgagcatggaagaatgatttttttccgtcagtctgcaaacttcgcaaaccttgttccacgctttttctctatcggcgaggccaagtattgtctccgcttcttcaaacacgtttctcatatattttttgtaagcgtcatttcttaacagctctccgtttttcacgcgcagcaatgcagttaacgggttgatgcatacattgatgatcagttttcccgttaaaagccgataccagtcgttttcatcatatacgggaaaatcccggtgcatgccggaaaagatgcttttgagcgtttccggccgggatgcgctgaatacactccatcttacggctcccgctcccgtatgttcaacggcatgatccgatatcttttttgctccgtgctcaactgtgccggcataaagcgaatgatccgtatgccaatctctaatgtcgtgtatgtgtcccatgccgttttgcaaaaacagcacattcgtcccttttaccgtctcaagatcccgcagcacagcactgagctggtgctgtttaacggctgcgattaagaggtcgaatccggaagtgatgcctgtttgcgctctgcatgccgccgtacattctattccgtctttcaaaagccgtataccgcctgagttaatcgcatcagcctgctccgtccgccgcgtaatgactgttacctgatggcgggacgataagtagtaagcacataaaaggcctaccgctccgccgccgataattccgattttcacactgtcacaccctatatctgcatttttccatattatcatagcagaagccgccgcaaattacttcaatttcgttttgagcaaaaagacaggcaagcatattatagttggaattttcaattaaagcgtttacaataatggtagaacacaacaaaggggagtttgtgttgaaaatagagcgcctgctcatcaactttaagacactcgaagaatttaaaaggtttaaggaatacgggatgcaggagctgtcgatgcttgaagatcttcaggataatatcattgaaaatgacagcacctcgcctttttacgggatttacttcggggataaactagtggcgagaatgagtttatatcaggtaaacggaggcgcgaatccgtattttgatcagcgtcaggactttttggaactttggaagcttgaggttcttccgggctatcaaaacaacggatacggaaaagcgcttgttgattttgcaaaatccttcagaatgccgatcaggacaaattcacgcatgaaatcagcagaattctgggataagatgaattttgagcccgttaaatatgatatggcgcgtgataaaggagaaaatccttacatctggcatcccgatatggacggtgaaatgacatccggagaaacggcataataaaaaaccggccgggccgccgccctcaggccggttcattttacaggctctgcgccgatttcctgtcgtcttcttttgaattgaccatccttctcgctctgtccataatgtcaattaacgctttataatcttcttccgtcatctccagcttgtttctcaagctttcattttcctcacgcagatcctcgacttctttttgcagcgcggtcagctgttctgtgagtttttctttttcatgacgcacatccgctgcggccggcgactctttaaattgctgaagaaacaaaatgacatcatcaatggacagctctttttctccttccgccctgcggatcggaggctgtttgacggttcccggcagattggcggaatgcaccccgatctgctttcttaattccttccgctgttttttcgccagttctatccctgactgatattgttttctgacataagaattccatctgaacccgcaggcggcagccgttctcgtcagcgctctgccgacttcttcaaaagcggaaagctgggtcccgccttcccgaatatgcctgagcaccacttcggccagcagcaaatcttcatcttgcgtccacgcgtcttgtctcgttatcgtcaatcgtatctccctccatatttgctcatttacctcatacatatgccgctgatagattagatagactactggcgctcacaattttttcggcggaagcaggccggaggggcaaaaaaaaagaaaagcgcaggaaccgagattcccgcgcttttcttcatacattaattgcttttaacatttatgtctttgccgttgtatgatccgcatgctttacatacacggtgagacaatttcatctctccgcatgacgggcattctgtcataccaggtacatttagtttgaaatgtgtacggcgcaatctttttttcattttagaagttcttctaaaaggtacagccattattcccacctccttaaagagttaagattcatcatcttgtgttaagagctttttcagatccgcaagtctggggtcgatttgatttttcttgtcttcctcagaaatcacttgccaatccttccccacttggggagcggctccttctttttgttcagtttcacaaaagacttgcataggaatttctaaaagaatctcttcttttacgatcggagttaagtcgacgatatcgtcttcagcaatatgaacgtcctcatcttctatatcatccgacttatgaaatctaaacagttcttttgtcgcgattgtaaatggatacggcacatcaactaaagttcttgagcacggcaaaaccatttcgcctgaaatcgtaaagtcaaacgaaacttgcttggattcaatctccgcgcggcccttcacccggacgggagaaatgcggcggatgtcagaattcaattttgtcagctcatttaactcaactgtttcatcaaattcaaagctctttttcgccatttgatgaagctgataaatcgtccatttcatttgtatcacctcaggaaagcaacaaacatgattatagcttttcagaatgtttttgtcaatattttttctttacagcataatgccgccgtcatgcaatcgttgacagccggataggctatgcatacactaaacgaaacggactaaaatatgcacttcatttgcaaatgtaccacacgaagcaaaacatagcaagaaaggcgggacaaatatgaaagcagtcggcctggttgttgaatataatccctttcataacggacaccgctatcatgcggaacaagcaaaaatcaaaacggacagcagcgtcgcggcggcggtgatgagcggcccttttttgcagcgcggagaaccggccgccgtctcaaagtgggcccggacaaaaatggcgctggaaaacggcgtggatatcgtcattgagctcccttatatgtatgccgtacaaaaagcggaattattcgcgcgcggcagcgtttcgcttcttcatcatttaggatgcagcagcttgtttttcggcagcgaaaacgggcggatcgaaccctttattgaagcgtctgaagcgttcagccgaaaggaagatgactgcagcctgattctgaaagaggagctgaaaaagggtctcagctatccggccgccgcctcaaaagctttttcacacatattcaaagggcgggacatgctcgatttgtccaagccgaacaatattctcggttttcactacgttagagcgatacacgccttcggttccgctatgaagccttatacgacagccagaatcgcttcccagtatcatgacgccgagcttcccggagataacagccggatagccagcgcaacaagcatccggaaagcgctgatagaaaaaggaacggcggccgcaaggagctttctcccggaagcgtctgcgcgtgagctggaggcatacagaaattcatacgggatatggcacagcaccgaagactatttttcatatgtaaaatacagcctcagcactctgtccgctgaagaattgagccgaatctatgaagtggaagaaggccttgagcacagaattctgcgcaccatcagacaagcccgatcctatcgcgaaatgatggaacgattgaaaacaaaacgatacacgtggacgaggctgcagcggatgaacacgcacattctgacacggacgaaaaaggaggacatgcatcggctcttacagccttcaagcgctccttatatccgtcttctcggaatgacgaaaaaaggacaggcgtacctgtcggcaaagaaaaaagagcttaccgcacctctcgtcagcaagctctcttctttctctcatcccgctctggatctggacatactggcgggacgggtttacagcctgccgataaaagaacctgaacgcacattttttgagaaacaggaattttcacaagcgccgatccgctatgatgaagacgaacagcgttttttgaatgcgtaaaaaaagcacctgcctgtatcaggtgctttttactttcagatgatccaaatagtcaagtgcgtcctgcatggtgtcgacagggacgatcttcatatcggacttgattgctttcgccgtttttaccgcatttttgtaatcagaattttcagctccgttttgattcggcgcaaagaaaatatcttttcccgctttgtctgcggcgacgactttctgatcgattccgccgatcggtccgaccttgccgtccacgtcgattgtccccgttccggctatattatagccttttgtttcgtcaggttttgtcagctggttgtaaatttctaaagacatcatgagacccgcagaaggcccgccgatattttcaatgctgaaatggagatccggctttactttcacgttccgatccgtatataacgcgacgccgattcccgctcttttcgggtcgtccgggaatgatttcagcgcaatgtcaacggtcttttctttcgtgtcccgttcaatgtgaaacgttactttctcccccgcttttttgctgctgatataatcaatcagcttttcagcggattcgtatgttttcccgtccgcgctgatgattttatcaccgacctctatttttccttttgccggcatgtcagagacgactgagctggcgaaaatcccgttaaatgagtatttcacctgtttcccggctttttgataagcggcaatgaccgcgttttcttgggagcttttcatcatttgcagctggcgcttcatataatccgagtccgattcgccctcttcttttatgctttcatcagggacgatttcatcgtaaggatgcactttcgcccaaagatatgtatacggattggcggggcctactttgacagtcatcaaggaaaggcttcctttttcaggatagcctccgtccaccttaatcagcggtctcagctctgatgcttctcccggctgtgtaatgtaatacggaagcttaataaatgtaacagcaattaataagatcaggatgataaacacccagcgaaaatgttttgctttcatatgagttagccctcccagttctctatttcttgtttaatccggccgatcatccggtctgcggcttcttcgcccgctgtgatcatatgatcaatgttggcaaaagaacttgagctgaatgattcaagagaagggcggatcatgacgtctgcggcaatggtctggtgacggaccaattcattttgcagtatatccatactttgcatgattacatcaaaaatatgtgccgctttttccgtttttttcacccgggatacgtcagaggcgatgacgatatcagcacccatgtcttttacggcggacaccggtattctgtcgaccaccgcgccgtcgactaacatacgtccgttcattttttgcgggacgaaaacgcccggtatgctgatgctcgcgcggacggcttcggatactgaacctttcgtaaaaacgagtttttcgccggtctgaaggtcgcaggccacgatgccgagcgggatccgcagttcttctatcggcttgccgtacgtataggcatgaacgagctgcctgatgcggtctccttttaaaaatccgagcctcggcatcgtataatccgcatacagccgccgcttaaatgctttggcgacttttttcatcgtagccacgtcatgcccggccgcataaaagctcccgactaatgctcccatgctgctgccggcaatcatatcaattggaatctgatgcttatgtaaactggataacactccgagatgagcgatgcctcttgcccctcccgaacctaacgctaacccgattgtaggtttggccaacgcgacgaaccccctaatagacatcctatacatgaattctatggtctaaattgaacccctatgctcgtatattagtacaggatgacaaataggtacttgcccggccgcctttaaggtctgttctatattttatcatgatataaatgtcagtgtgcaattttagcatcggggaggtaagaatgaatttgtctaagtttcatacatttttgatttcattgtttttcatttttttgacggcgacggttatttcacaccctcaggcctcattcgaagcctccaaaaccggtctttccatgtggtgggaggtcgtttttccttcattgcttccgttttttattctatctgagcttttaatcggattcggcattgtcaaatttgtcggccttttactcgaaccctttatgcgtcccattttcagagtgccgggggtcggcggatttgtactggctatgggcatggcttcaggcaatccggccggcgcgaagctgactgcacggctgcgccaggataaacaaatctccagagtagaggctgaacgcctcgtctcttttaccaattcatccaatccgttatttatattcgctgccgtggcggtcggcttttttcataacgcgtctctcggcattctgctggcatcggctcactatcttggaaacatcgccgtcggcctgacgatgcgttcatacggacggaaagaagaagcggcgtataccggtaaaaagacgatcgctctcccttctctgaaggaagcatttctggccctccacaaggcgcggctttcggaaaagcggccgctcggaaaaattttgggcgacgccgtcacctcttctgtacaaaccttgctgatggtgggcggttttattatattgttttcggttttcagccggttattatcaatcgtacaagtcatggatgtgctttctgtatttacaaacgcgctgctttccctttttcatcttccggcaaatctggacatccctcttatcagcggaatgtttgaaattacacttgggagcaagctggtcagtgaagctgatgccgccttgctgccgaaagccatgattgtgagttttattctcgggttcagcggcctttccgtacaggcccaggtagccggcattttatcggaaacagatatccgctttaaaccgtttttcgcggcgcgtatccttcagggcatttatgccgcactctttattctcttactgtggaagccgctttaccttgcattggacgaaccttaccagtccgtattcctccctttccgcgatcaggacgcgggatctgctgccgtcagcggatggaatacacttgttgaaaccgggcccgccatcacgctgacagctctcgccgtatacgcattgatttattgttacaggctgtcagcacggacaaaaaaaggatgagacgccgatcagcgcttctcatcctttaaatttctgcttcagcgcctgttcaacttccggaggaacaaactctgaaacaggcccgttatattttgcgacttcttttacgatgcttgaacttaaaaaagagtactgattgttcgtcatcataaaaaaagtttctattgattcgtcaagcacgcggttgacggaagtcccctgcatctcatattcgaagtcagaaacagctctgagccccctgataatcgccttcgcccgcttttttttcgcatagtcgattaacagtccctgtgacgtctcgaccgtaatattcggaatgtcttttgtcacttctcttaacagctcacagcgttcctcgactgtaaacagcggctgcttagaagaattattgagcacgcatacgtacacctgctcaaacacgtttgccccccgtctgataatgtccaggtgtccgtaggtgacgggatcaaaacttccgggacatacagctatacttgccacatcattaccccctatttcggtatatcgtcactcctgtaagcccgtaaatttcccttcttgttacagaaagcgcgccgacggcttcaggaagcacaacggctttatcatgctcggctacgacaaaaccgtcttcattcagcatgttctgctcatcaatcatttcgataagcgctttcagcttttgttccttatacggaggatctaagaaaattccgtcaaaacctttttcccgtttcgccgcggcatagagggcccgctctgcatcattgcggtatacttccgatgaagacagcagatcgagcgctttgatattcgcttttaccgtttggatggctttgaaatcacgatccacaaagatacagcggtcaaatccgcgcgacagcgcttcaatcccgaggccgccgctccccgcaaacaaatccagccctgttcctccgtcaaaatacgggccgatcatattaaaaatagactcttttactttatccgtcgtcggccttgttgatgtgcccggcaccgcctttaaggctcgtccttttcttgaaccggaaattactctcattattcacaccactttttctgaaaactttgatgtttctcatcggctgagccgttatgtataaaaacaatccctatcttatcataaagcattctttcaaacaatgaacgtgaaaaacgtgtatacatattcacattcctgtcaagactacgtgtaacagcatcaatgaatgatgttgttgccaaccgcggagaagacttacgtttccccataagttcttcctccggtttctcctctcccttttccttctccttaacttgttaaggaatagaaggaccccgcaggtatctgcggggatttttttatataccgactttataatcgtactctttcgctttatcaagctttgattcaaattccagctttaaaaaaggtttataagaaggctctaccttcttcacataagaataagaagaaatcttttccattgttttttcgatcaggtccatatcgcaatacagcacaacgtatttcagccgcttggaaacataatgaacgttgccgaattttctcagcattttgctgtgttttaaagaatgcagatatacgattatgccttggcgcttattttccatcatgatcacccgcctgactttctgttcattttatgtaaaagacgagacggccgtctcgtcaggaaactttgcatccgcagccgccgccggaaccgcagccgccgccgcaggatgacaggccgtcaaaataaggattccccgtcggcacttttacatgctccgagacggccgttccgagttcaatgctgatctcgtcaagcagcgactgaagctcagtctccgcttttttaaattcggccaccttatcgtttaaatcgagctcccgcttcatttctctcattttgcgggaaatctctctataatcaggatggtatttgccaaagcgctgcacatcctcatactgctctttaacgctcataaaagaacgaatgatccgccctgcctcttcatcttcacggagacgcttgtaacaatcgcggtaattttcagccgtctcagactgcagaatcatgccggcaagctgttccgcttcactttgaagcttgacggactcaattgttgcatacataaatacgcacctccagttgctagtttaccatgaaaccacccaattggaaaatgcggcgtttaaacgctttttaatcctgcgaacgcatggcgtgtaccatctgcatcatcatctgcgccatttgaatcccgtttgagaattgacttacccgatgcggtatcgtcttttcataaaaattcatcatgtcaagctgaaaggaattgagatcgtccggttttctcgcaagtctgcggtaccagacgggacgctgccgtataaaccgtttccgttcctcatctgcggatatgaattcctgaacctcttttcgcatacacgatccccttctttaatcctttctgaatgaaaaaggatgttgtccggagccttgccggggctgcttcgtgctgctccccgaaaattggcttaaaaggctttgcaatgatgaaatggactggctcattttattgatctgctcattcatttggttgatatccatctttttgacggcagtgaccatttttgaaacgaaatcgttcttttcagctggttcctgtttggtttccgcgtcggaagaaggctgaacggcctcgtctttaaaagggtcccacatcgaatcatcctcgcccaggagaacccagttttcatagacttcctgccagcttctttgttccttgcgaacattttggatcagtttgggatgcttttttacgaattgtttaaaatcatcgattgattgccgtgattgctgattcgccacaattctcaccccctccgaaaagttttgcctgctataatgtatcggttcatgcgccttaatgttcgcctaaattgcgaaaaaaagcaggtatatttttttcagcaggagcgccgctcgcgaaaaatcataaaaaaaccgcgggggacgcgcccctctgcggttttttactgccaaggcttaatgaagttttgcgtataatacttccggtccacgccgacaccgaggtgcgtataatccgggcttaacagcgccttcctgtggccttcgctgttcagccagccctccacggctgcaggaccgtccacatagttgtaggcaatattttcaccggcctcccggtatttcacatcgcctttttccaagcggtccttcagagtcccgtatttctttgagacgtgagagaaatacttgttatccttcatgtccttgctgtggccgaatgccactttcgcggcgccttcgtcccatttcagccttgccagtccgtgtttcacgcggatgacatttgtaatgtcgagaatctgctgttcactcgctcgttcaatgtcgttccattttttatcagaaactggctcgggttctgtcagctttcctctgtacatgacctcatacggcctttgtttcaccagcgtttccgcatcaaaagccctgatgcttgacagattcccgtcaaatttgtccatgtacagctgaacatacattccgcctatcttgacggtgggacgggtattgatatcttcttcggaaaactcaaaccgatacgtgtttcccttgtcagtcacattgacaaaaggagaaacctgcgtcgttttaaaaacttcgcccgtcgattcgccgatcttaaacggttttgcgttgatgccgcttcccgaagcgtataaagtcacggctttatcattcaaaataccgacttgtacgtattggtctttcccctggttgtacacccaccactcgtaatcgtaggcagaaggatctttccgggacggttccccaagtttctttttcacatcggcggcagatttccccatgagagaaagcagtccggatgacggcattttcagccgttttccgctctcttcttcattggaaacctgaggctcctcctgattggtctttttctgaggagccgatccatattgtataaacagaacatacgctccgtaaataagcaaaaggataacgagagcccttgcaatatttttcaacctctcacccccatatcatcaaaccgttctgtttttgtgtactcttatacagtacagcctatttgcatcgtccgtgatttatgtttaatggataaacccctccggacctccgtcttcagaaatgtcagacagcgcccggcctgcttgctcatttgattgctcggccaacgaaagatcgccgagcgtaacaatgccgaccagttttttatcccttgtgacgggaattcttctgagctgatgttcagccatcaaatggagcacctcctccacagaggcgtcttcttctgcactgataacccgctctgtcattgcgtcggttattttttgagagttcggcttttttgaagcaattccccgtaatacgagatctctgtctgtcacgatcccgacaagtgtggcgccgtcttcatccactatcggaatggcgccgacatccgcgtctttcatcttcaccgcagcttcatatacattatctaatactgtacaatattgcaagtctgacgtcatgagcttattgatctttgtcattgcggaattcctccttttttctgctactattgtcgtcaaatttttgtttttgcatactttcaccgtatgaatcattgaaagtgtaacgctttcatactatgattgtcaggaaagggcatttttaaaaggagggggaaggtttgaagtttgaaaacagcggtcttgaaggggtaacagcggagctcagccgcttgaacgatctgatggaaggcaaagggctcattctggctggacaatgggattatgaaagagtgacttacgacaaaaagttttcagtacctgaggggacattttatctgcggattcaaggaacggcaaaagagggcgatgtcggcggcagacgggccgtgattcagctgaaggcccctcttttaggaaagcattattatccgcacggcgtagaatacggcagcgctgaagaatttccggaacatgtcatcgctgaaagcaaagctttactgcttgaattggaagagtcattaaaaacagtgcaaatgtaataaaaaagtacagcatattctgctgtacttttttttatgagacggtatgctcgatatacggcggctctgacagcgtatctttttcccgttccgttctgacccactgaaaaaagatgacagccaaatatattccgtagaccgcctcttgaatgattttcatcagcactgccccaagctgctgatcttccagaggaggtagcgtgttaaacatctccggcccggataaagggatctcctccagcaaatctaaaggaacgcaaagcttcattgcttcggcccaagccgccggatctgtatacgtggcatacatgggcgccccgctgaacataatgagcgcgcaggccggcgttaacaaaatcccgtccgccataatataccccagcttcattaaaccgctgagacggggcagaccgtccaccttatgcacaagcggccaccacataaaaaacgccgttacaaagatgagtccgttcatcagcgtgtgatacagcgaatccgttttgacgaaatcaaatataaacgggatgtgatacagcgaaaaaataccgttaaacagcactaaagcgataagcggcattgaaaaaaatgaaaacagcggctttacgacaggacggaagatcagttttttccatgcccagccgggaattccggagatcaacagcggcggtacgactaaaaacagaaccgccatctgcgccatatgggcgctgaacatcacatggcccaataaatcgaccggacttcccgcagccgcgtaaaaaaatagcgcggaaagcacaaacagcaccttctccttaacggccacacgtcctttatgccggctgcaccagtaaaagtaaacacctgttatcacggcagttatacaaaacagatacgggctccacattgcgcgaaacccgaacatttccaaattaatcaaatctctcactccccgccgccccgattaccaccaaataatcgtgacaaatgcaagcacggtgataaacgcgacaaatattcccgaatacagaaataatgacggcgcttcatgccccttctggctcatatgcataaagtaaaacagctgaaagatgacctgaatgaccgcaagcaggatcagaaacggcatcgtaaaccatccggcaatgccgtctgcagccaccgtcaaaaacgcgacaagcgtaaggccgatcatcaagccgaaggagatgacctgatatttcatctcctcggcatttttccttctccgatattcaagatccgtactgacagtctctctgtttttgttatcgtccatcgttatcccaccatccccatcaaatatacaacggtaaagataaagacccacacgacatcgataaaatgccaatataagctggccacataatatttcggcgcattataaaggctgagccctcttttcgcattccggatcatgagcgcgctgatccacaacagcccgaacgccacgtgtgctccgtgtgtgccgacgagcgtgtaaaacgctgagccgagcgcagagcttgtaatggtaaatccgaactcgtgagtgtaatgcataaattcatagatttcaacccctaaaaatcccgctcccaataatacggtaaccagaagccacacctgcatttttttaaaggagaaatttttcatatgatacatcgcatacacactcgttaagctgctcgtcaaaagaagcatcgtcgcgataaacacgatcggcagctcaaacatctcagccgttgacggccctccggctttagattcccgtaaagcaaggaatgtcgcaaatagcgaggcgaacagaaccgtttcgccgccgagaaacagccaaaatcccaaaaacttatttttcccctccagcgttgctttttcaggagaagccggaaaggtttcagccgtcattttttcctgcagctgcattacgccttcacccctttatcatcattcggcagatcttctttgtgaatatgatagccgtaatcatcgaccacagagcgaagcagcatggtaaagaatgtgatgccgagccctatgaagataaccggaagcccccatgaataatcggagtggtataaaaacccgaacgctgccacaaacagcccgaaagatatgataaacggcatgatggagccgttcggcatatgaatgtcctctacaggctctgcaggcgccatcccttcatttccggcctgcttttcaatccacagcgggtcaagtccccggacaaacggaagctgtttaaaattatattccggcggcggcgaagagaccgcccattcaagcgtacgaccgtccagccacgggtcgttcccgacgtatttcccctttattgaggtataaataatattgacgacgagtaaagcggccgcgcctgccatgaaaaacgcgccgattgaactgatcaggttgccggtatcaagcccctggccgggcagatatgtgtaaacgcggcgcggcattcccatcaagccgagaaaatgctgaatgaagaaggtaagatgaaacccgataaaaaataagacgaacgaaattttccccatcgtttcatgaagcaccttcccgaacattttcggccaccagaaatgcacgcccgccaggatgccgaacacaacgccgccgataatgacgtagtggaaatgcgctacgacaaaatacgtatcgtggaactgataatctgccgctgcggccgccagcatgacacccgtgactcctccgagtacgaaagaaggaataaaggcgacggcatacagcataggcgtcgtgaatttgacgtttcctccccagatggtcaaaagccagttgaaaattttaatgccggtaggcaccgcgatcgccatcgtcgcaaccgcaaatatcgcattagcgatcggtccgagtcccgttgtaaacatgtggtgaacccataccatgaacccgagaaagccgatcagcacgatcgcaaagaccatagacgaataaccgaacagacgtttcctcgcaaatacgggaatgatttctgaaaaaatcccaaaggcgggaagaattaaaatgtatacttccggatgcccgaaaatccaaaacagatgctcccagattatcgtattgccgcccaattcaggattaaagaaattcgttccgaacaaacgatccagcatcatcagcgccaaaccgacggtgagcggaggaaatgcgaataaaatgagtgccgacgccacaaatgtcgtccacgtaaacagcggcagtctcatatacgttaaacccggcgccctcatattaataatcgtggcgagaaaattgatccccgcaatgagcgtacctaagcctgatatttgcaggccgagcacgaaaaagtctatgccgtgccctttcgaattcagcgcaagcgacgcgtacgacgtccagcctgcatcaggagcgccccctaaaaaccagctcagattcaaaaagatgcctccgaagaaaaacagccaaaatccgagcgcattcaaaaatgggaatgatacgtcacgcgccccgatctgcagcggcacaaccgcgttcatcagcccgaataacagcggcattgccgccaggaagatcattgtcgtgccgtgcatcgtcataatttcattaaactgctgagcacccataaaatcgttccccggcctcaagagctgaatcctgataagcatggcctcaagtccgccgacgacgaagaaaaatcccccggcgatcatatataaaatcgcgattttcttatggtcaaccgtcgtcaaataatcccaaagcaaagagctttttctttgctgtcctgtaagcgtattcatcatttgcgacctcccccctgatatctccctgtcctcacttgttctccgctttcagcccttttaaatattcatacagcgcatccgtttcagcgtccgagagcttcggataagtgcctgtcattttattgcccggtttaatgctgtccggatttttcagccaggcttttatattctctttattcgcatccttaatgccggccactttgacccgttcaccgaaggtagcgaggttcggagccgttcttgccgcttcagcccgtttatcattgggctcaaccgcatgacagctcaggcagtttttttccttaaacagctcttctccttgtgctgctaaatcggaatctgttgtatgcttataatttttcatcgctttcgtccattgtttaaattcttttgacggcagcggtttcactttgaaatccatcagcgcatgtgaaggtccgcacagctctgcgcatttcccgaagaaatattctcccgcttctttgctgcgtttagaatcgaaggtcagaaagaaagtgttgtcattatccgtattcgtatcgatttttcccccggctgacggaatccagaaagagtgtttcacatctgaggacttcagcttgaaatagacgcgttcatctgtgggaacgatcagctcctgacttgtcacaaacccgtaatcgggatactcgaattcccaccagtataaattcgcccttacattaatcacgagcgcatcctctgctttacggtttttcttatccatcggcgacgtatccgccagtgccaatgtatcgatgacaaccggaatgacaagaataatcagaagcaggatcggaataacggtccaggtgatttctaaaaaacggttcccctccacctgtttcggtatcgtgtcttcccctatacgcgaccgtctgaatctcacaatgacgtaaaagaaaataactgctacgaccgcaacgacgacaaccatgataagtgtgctgagcaccgtcagatcatattgtttatcagccacttcgccggcaggcttgagtgtggacagaaacggttttccacagccgctcaataaaagcggcactaaggctaataatgataaaagacgccaacgctttaacatttcacccaaccccttttttgaatcagtacgagatgcacaagcagtaaatctgcttccagccgaaatacttcatttcctcatttcttaaaatatgagattttttacttaaaattccatctatgtataaaagcaaagccgcctgattaaacaaaaggtcaaggcggcgtttactagttgtcattgtttgttttggcgatcaaacaagctcattattcaattaaaacagcgtgaagaccaccatcgctacaaaataaatggtcatgtagttaagcgaatagacaaacataagggttgcccacttcatgatgtttttcatgcggaatcccatcagtccgagaacaagccatccgacattcagcaaagtgccgagaatgacgatcggaagaccgagactgccgaggaaaaacggaagcggcagcaggcatgcgacccagacgataatctgtcttttcgtcacttcaaagccgtgcactaccggaagcatcggaatattcgctgctctgtaatcttccgtctttttaatcgcaagcgctaaaaagtgcggaatctgccagatgaataaaatcatgaataaaacccacgcgacaacaccgatgtgcccttcaaccgctgtccagccgattaacggcggcacggcgcctgatacacttccgacaaccgtattaatcgtataacggcgtttcgtccacattgtataaagaacaacgtacgtaaacacgccgataaaaccgatgactgctgccatcacggtggtcatcaaaagcatgataagtcctaaagcaatgagtaaaattcctgaccacagcgcttgattcggctgaatctttccggttaccgtcggtcttactttcgtgcgttccattaaatgatcaatatcacggtcgtaatagttgttaaccgcacaagaaccggcgatgatcaaagaagatcctattaatgtaagaagcacggtgtttaaattgcctaaaaaactcagaccggatatatgtaacgcaagccacatgccggtaaaagtcgtaattaaattcgaattgacgattcctattttgataagcgaaaggaaatccttccatgccgtcgtctcttcaatctgtccgtctatagctgtatcgtttaaaattctggaattagccataacgtaaacctcccttacaaacctaaagcaggttttttaagacctgcaactctatcatacaagataatgacctgtaaaaaaacatcctcttaaatattaaacgagaaacaggaatttatttgtgaactttttatgaattttaccaaatccgccggcttcataataaagcggttactttatttctatcagacccatctggaataatcaaccccattatctaagaagtcctgattctattatatttttgtgaacaaacagaattgagaattgccacaaaacacatattcgcttacacttggtacgtatatcattttgtccagtttgttaagaaggtgaatgtaaaatgaataaagctttgaaagcgctcggcgtgctgacgacgttcgttatgctcgtcgtgctgatcggcggcgctcttgtcacaaaaacaggatcgggtctcggatgcggaaggcagtggccgctttgccacggccggtttttcccggagcttaacgccgcttctatcattgaatggagccacagactcgcaagcggtgtctcaatcgttctcgtgctgagtctcgctttttgggcatggagaaaagtcacgcctgttttccgtgaaacaacctttctcgccattatgtccattatctttttatttttacaggcgcttctcggcgcattagcggttgttttcggatcaaatgcgctcgttatggcgcttcatttcggcatatcgctgatttctttcgcttctgttctgattttgacgctgctcatatttgaagctgataaatcagacaaaaagctcgtcaagccgctcagaatcggcaggaaaatgcagtttcatatgatcggcctttcgatttacacgtatatcgtcgtttatacgggggcttatgtgcgccatacaaaatcaagccttgcctgtcctgacgttccgctttgcagcagactgaaccacggacttccgtctcattttcaggagtgggtgcagatgggccacagaacggcagcgctgcttctgttcgtatggattcttgtcgcttttgcgcatgcggtgcgctcctacaaagaccaaaaacagattcttgggggctggatagcggctcttgcctttgttgtattacaggcgctctccggaatcatggttgtttattcagaaatggccaccggctttgcacttgcccattcgctctttattgccggtctgttcggtgtcttatgctatttcttattattaatcgcccgcttccgctatgaatcaaaacagcggaacatctgaggcacatgaaaaggccgaagcatcaaagcttcggccttttcacatataaaaaacctgatcgcacacggggcggatcaggttttttatgtttattttttacgctttttcaatttcgatcagtaaatcgcctgtctgaatcggttcaccgtttttcacatgaatctgctgtattgtcccggagaacggcgcctgtaccgtcgtctccattttcatcgcttcattaatcatcagatgatcgcctttattcacctttgccccggtttccgttaacaatttaataaccgttcccggcatggatgccgcaatgtggcttgggtttgtccgatctgcttttaatttttcctgtacggacgatttaatgctttcatctttaatgaccacttcgcgcggctggccgttcaattcgaaataaacgacacgtgtcgcatctggctgcggttcaccgatagatacaagcttcacgatcagcgtttttccgcgctcgatttccacttcgatttcttcaccgagtgtcatgccgtagaagaaagtcggtgtgtccaatacggaaatatcaccgaagcgttcagccgttttaacatattcagtaaatactttcggataaagagcatacgcgattgcgtcctgatcactcaattccatctgatgcgtttctttccattcttctttaatgccttcaaaagataccggttcaagcagctcacccggtcttaccgtgatcggcgtctgtcctttcagaacgagcttttgcagtttttccggaaatccgccgtgcggctgaccgatctgccctttaaagagctcaacgactgaatccggaaaatcaagcgtttcgcctttatcataaacatcttgttctgttaaattgttttgcaccatgtaaagcgccatatctccgacgactttggaagaaggtgttactttcacgacgtcgccgaacatgcggttgacaacgctgtacatgtctttcacctcattccagcgatcgcccaggccgactccttttgcctgctgctgcagattgctgtactgcccgcccggcatttcatgattataaatctcagtatgcggagacttcatcccgctttcaaattcactgtaatactgacggacggattcccaatattgtgacagtctttccacctgccggacatccatttcaggacggcggctgtttccttcaagcgcatgataaaatccgcttgcgctcggctgtgaagtcagacccgccattgagctgacggcgacatccacgatgtccacacccgcttcaacagctttggcatagagaaagacgccattgccgctcgtatcatgcgtatgaagatgaacgggaatatcaatcgtttccttcagcgctgagacaagttcgtatgcggcttgaggtttcaaaagaccggccatgtctttaatgccgagaatgtgcgcaccagacgcctcaagctctttcgccatagaaagataatattgcaaatcatatttcgtccgggtcttatcaagaatatctcccgtgtaacaaatcgcagcctccgccacttttccggtttcacggacggcatcgatggccagcgtcatcccttttacccagttcaggctgtcaaagatccggaatacgtcgataccggactccgctgactgccggacaaatttttgaatgacattgtcgggatagtttgtataaccgacggcatttgatgaacgaaggagcatctggaacaatgtgttcggcacttccttacggagatcttcaaggcgtttccaagggtcttcttttaagaaacggtacgctacatcaaatgtcgcgcctccccacatttcaaggctgaacagttcaggccacagggcagccgtaggattcgcgatttttttcaaatcgttggacctgatccgtgttgcgagcagggactgatgggcatccctgaacgttgtatcggtcaggagcacggatttttgctctttcacccagtctgcaagtccctcggcgcctctttcatcaagaatctgtttcgtaccgcttgccggcttttccccgatatctaacgtaacggtctgaggcttatcaaatgcaggtttttcttttttcccgattcccggaaaaccgttcaccgtgacattgccgatataggaaagcatttttgttccgcggtccttctgttttgggaaaacaaacagctcaggcgttgtgtcgataaacgatgtgtcgtattggcccgtcaggaatttttcatgctttgccacgttttcaagaaacggaatattggtcttaatgcccctgatcctgaattcctgcaggttgcggaccattttcgctgatgcctgttcaaacgtcagcgcccatgtcgacagcttgacgagcagtgaatcataataaggtgtgatgacggcgccctggaagctgtttcccgtatcaaggcggacgccgaaaccgccgcctgagcggtaagccataattttacccgtgtcaggcataaagtcattcagcggatcttcagtggtcacacgtgattgtatcgcatacccgtttgtaaaaatgtctttctgctctgggatattgacggcgcggctgtgcagtccgtggccctgcgcgacgagaatctgcgtctgaacgatatcaacccccgttatcatttccgtaatcgtatgctccacttgtacgcgcgggttcacttcaataaagtaaaattcaccgcccgctacgagaaattccacggtccccgcgttgatatagccgacatttttcgcaagcgccacagccgcttcacagatttcgtcccttaattcaggctgcaaagatacactcggcgccacttcaatgaccttttgatggcgtctctgaacggaacagtcccgctcatacagatggacgacattgccttctttatctccgatcacctgaacttcaatatgcttaggattttcgatcagtttttcaacatacacttcatcatttccgaatgcggctttcgcttctgatttggcccgctcaaacgattctttcaattcgctttcgcttcggacgattctcatgccgcggcctccgcctccgagcgatgctttaataataaacggaaatccgtggacttttgcgaattgttcgacatcttttaatgtttcagccggtccgtcactccccggaataacggggataccggctttttccgcctgctccctcgcctttaccttatctccgaacatatccaaatgcgctgacgtcggtccgatgaatacgatgtcctcttcttcacagcgtctcgcaaattggatattttcagagagaaatccgtagcccggatgaatggcatcaacgccgtttctttttgcgatctcaataatcccttcaatatcaagatacgcgtcaatcggttttttgccttcgcccacaagataagcttcatccgctttatagcgatgataggagcccgaatcttcttttgaataaacggctaccgttctgatgttcaattctgtgcacgcccggaaaatccggatcgcaatttctcccctgtttgctactaacactttttggatggattgttgtgacaaacttttctcccccttggcctaataaatatgtagtttataataaaggaatatccgccctgtgtatacacttgttttttagagatacacagatttttccgtctgccgtctttttacccctttagacggaacgggctccctctttttcttcttttctgagtacttgacatgcatgctgacattcaccaatataccggcgctcgtcaataacaaaaacattgatgatcccccgtagctgataaacggcagcggaacacctgtgatcggaattaaaccgctgacaccgccgagattgataaaggtctgaatcgcaatcatgctggatatcccgattgccaaaaggcttccgaacggatcttcacattttctcgcaatataaaaaccttttaacaccacaaaagccagcagcacaatgacaaacaggacgccgaaaatgccgagctcctctgaaataaccgccataataaagtctgtatgcgattcaggcagataaccgtatttttgaatgctttctccaagaccgagaccgaaaaaaccgcctgagccgatcgcataatacgaatttataatctgcagacctgatgtgctggcgtatttaaatggattttcaaggctttcaaaccggctcatacgcccgggtgtcaaaatatcgtcccatttcagataaatgatcgggctgacaaggagtaatacgattcccgccatgagaaccagcctgagcagggtccttccgctgaatcccgaacacataatgacgcaaaacgcgatcagaccgataatcatcgccgttccgaagtcgggctgaatagcgataagcgcacaaatgactacggtgacgatcaccggcggcgcaacccccgtcaaaagctgatcgatgtagctttgtttctttgcgtacaccgcggcaagatacagtatcagggtcagcttgacaaattcccccggctgaatggccattccgccgattttaaaccagctttgcgcatttccggcaacatgtccgaaaacaaacagcgcgcaaagcgcagccactgacgcaagcagtatgattttctgaatcttttgatgggcgaacactttgtacggaaaaacggccgcgataataaacagcacaaaccccgcgatgacggcgaacagctgccgtttaaagaaatagtcgctgctcacgccgtaacgcataacggcggtaatcatgcttgagctgtataccattaccaatccgaaactgcacagcagaatgatagcgcatatcaatgaataatcgtaagattttaacattcttttaaacataacatcctctttcctgcttaaagcttacgtttaatacctattgcgtattatattttactataattcataaacaatttacgcagtttctttatagtttttcggatgaaatgcagattaagagaccgtcttacgaaaagaagatgcaaaaaaacggtttacggttataaaaaaacccaaaccgttgaatagtttgagtttgatcatttattttcctgtaaacgcgtcatgcaaagcagacagttctctttcaagtctgtccagcagctctttgccgtcgttttcgtcaactaatcccaggcggacagcaaaatcgatttccctcgacagtccgaacatctgagtatccaagacctcttcatacagaggacattgaggcatcgttaagttatccatttgtactcggatcagcttcaaaatcttctcagcatctaacttcaacagctcgaatgctttctgctgatggtcaactataatctctgaagccaaaagtatccctccgttccccaggcgagtacctaattcttctatttatcataaagggtatcagatgaaattgcaagaggatttaagcagatgttatgataaaaaatgtttcaaaaaatactcagcctgtatttctcagacatgatttccaaaagcttcacacccgcgatgctgttgcctttttcatcaagcgccgggccgaatataccgattccgaagttgtacggcgaaatgcccatgattcctcccgaaacgccgcttttagcgggaatgccgaccttgattgcgaattccccgctcgcattgtacatgccgcatgtcaccataaacgtcttgcagattctcgccacatcttttttaatgacctgctccccggtttccggatgcttgccgtcaagggcgaatacacagccgattttggctaaatccagactgctcatcttaatcgcgcactgttttgtatacaaatccatgacctcttcaacatcgcctttaaaaatgtcatactgcttcatgtaataacacatggcccgattaatcatggaagatttgaattccgattccgcgacatgtctgcaatatgtaatgtcctgattgttcgcaagtcttctgatgaatccgagcaggtaatccaggcggtctttcggcgaatgccctttaattaaacccgtaacgatgagagctcccgcattaatcatcggatttaaaggcttgcccggattcactgtttcaagcttaatcatggagttaaacgggtcgccggtcggctcctgacccacgcagctgaacaccttttcctttccgtaatccatcagtacgagcgccagagaaagcactttcgaaatgctctgcagcgtaaatgtccggtcggcgtctcctgccgtcagacatgtattttccgcatgataaatcgtgaccgaaaggctgtcttgttcagattcagccagagccggaatatagtctgccactttgccttctccggttctttttttcgcttcctgaactaatgcgtccagctcttggtaatgccggcataccatgtcgatcatcctcacttcgctgccgttgtatacatctaatttgcaacgcaaagtgacaattcatgcgaaaacttttatactttaagtaaaggggggcttcaacatgagcgttattcaagtaaaaggcaatgttacatacccgattacaattgatccgagtgtctggattttcgatgaccgcaaatttccgtttgaaaacaatcagcctgttcatcaggacggctctgcagaaacccaggagcatacgcttgatcctgaacgggtgatcagagaagggcgcatttcgccgccgactttaaaaagtgaaaaacgttatgaaaaagaaagactgatgaacggcagcttcgccatgaagctcggcgctgttttagcaaatgccgagccgaaagaaagcgctgtcctgtgcgcatttatttcaaaatcagaaagaaccgaagtgccgcttgaaaaggcgatggacgcaatcgcgcatttcagcgatgcggggaaaccgcttcaagacggcggtccggtccatttttacgtggacggagactttgaaaaaccgataacgggcgtcacagaaatcgaagttttataacaaatcggcggcaagctgtgcaaggccggatctctcacctttcacaagcttcacgctgccggagacggtttgtcctttaaaccgctctacaacataagcaagtccgttgtttaaactgtctaagtatgggtgatctatttgctccggatcgcccatcaggacaattttgctgccctctcccacccttgtcaaaagcgttttgacctcgtgcctcgtcagattctgagcctcatctataataataaactgatccggaatgcttcttccccgaatgtatgtcagcgcctccacctgaatcgatccgattcctgccaaaatcgcttcaagttcacccggctttttcgcattgaataaaaattcaagattatcaaagatcggctgcatccacggcttgagcttttcctctttttcgcccggcaaatatccgatatcctttcccaccgggacgatgggacgcgcgacgatcagctttttataaataccgagatcctccgtctgcagaagccctgccgcgagagcaagcaaggtttttcccgttcccgcttttccgatcagggtgacaagcgggatatcttccctcagcaggagttcgagcgccattgtctgctggacgttcttcggcctgatcccccatacgtgctcatcatcgaaaacgagtctttttacggtctctcctttcttatccgccatgccgaccgcagacgaagatcctcctaattcatctttcatcagcacaaattgattcggataaacctgatgctgctgaagctccttgactggaatttgtttgtttttataaaacgaggcaaaccgctctttattcataaatatatctttgtacccgctatatatttcatgatggtcaacgactctgtcgtttaaaaagtcctccgccaaaagcccgatggcatccgcctttaccctgacaagcacatctttgctgaccaggatgacgaggcggccgttttctttcgtttcctcctcaaggcttaaattttttgccaccgccaaaatgcggttatcattcgttttttcgataaaaatttcttggagctgatgaaatgaccggtggttcagttcaattctgagcgttcctccgctttgaagcggaactttctcgtgcagccttcctttctccctgagcccgtctatcagcttagatacgtgcctcgcatttctcccgacctcgtccatataccgcttttttgaatcgacctcttccagcacgacggcggggatgacaacttcgttttcttcaaaggaaaaaatggcgttaggatcctgcaaaagtacattcgtatctaacacataaattttactcaagtctcagcctcctgaaataaggatcaaagcccatcgtgtgcttctctttccgcgaaaaacggggatgcctgctaaaatatatgatttggtgaataaagatagaaggttaattcaacaataaaataaatgaaagcattcaaggagggaatctgacgtgcgaattcttttcattatcatacaagccttgtttatcctgaccggctgcactgctgtacaggacggccgcggccgcaatatccagaacgaatcaaccgatcagcgtgatgcaaaaccgattcatgtaaaaaatacggctcctgagacagctgaaaatcccggccggacagacatcgctaagcatctcgtcgaggtaaccgaaaaaatccccggcatttcagatgccaccgcggttgtactcggaagatactccgttgtcggaatcgatgtggatgacaatttagaaagaagcaaagtggagagcattaaatacacggtcgcccaggcgttaaaaaacgatccttacggcgccaatgccgttgtcgtggctgatcctgatacggtttcccgtctgagaggcatgggcagcgacattaaagccggccgccccgtttcaggcattttggacgaacttgccgccatcgtcggtcgtgtcatgccggaagtcccgaatgatgtgaccgacaatgaaaaagaatcaccgactcaatcgaatgatgatcagctgaaccaaagagaccagaacaagctgcagaacgaacagaacgatcaatcggatcatcatatgaaaaaccgccagtaaaaagcagcgcccgctccaaaagaagggcgctgctttctttccctttggcaggaggggcatccatgatataatgcttgtcatagtgaaagaggtgaaaatcaatgagagtaaaatgttccatttgcgacaaaattgaacaaattgatgatgaaacactgacagccaaacgcctccgcaatcgtccgattcatacatatatgtgccgggaatgccatgaccgaatcaaaatcaaaacggaggcgcggctgaataccggacacttttcctttcatcctggacaaaaagcgaaaaaagataaactgaaaaaataaaccgcaataaaaaatgacccgccggaaggcaaggtcatttttttattgcggtttagctgactggctttttttggactggtgcagacggattttgtaaatgatcaaaatcaaggcggcgacaacaagcccttctccgaccggcaaaaacacaccgaaaaaagtcagcacggtgcagccgagcacgagaaagagataaactgccgcagccttcaaaaccggcagccgtttggcaaagccgagtttaaatacaatcaccgaaagcacgacgatcgttccgtataacagccacattcccgccagcggatgctcatccacttggtaaagagccgcaaagaacgacagccgttcacttacttcattcaaaaagatccccctccccttttccgttcgggttctaccttttcaaattctgcaagtgattaagacattcctgctgtttttttctttttcgccgctttttcacgttcgtttttattcaggattttctttcttaaacggatggattccggcgttacttcgcagtattcatcctcgtttaagtactcgagtgattcttcaagcgacataatgcgcgctttcttaatcgtagtcgtttgatccttcgtagcggaacgtacgtttgtctgctgtttcattttgctgacattgacaacaaggtcattgtcacggttatgttcgccgacaatcatgccttcatacacttctgttccgggctcaacgaagatgacgccgcggtcttcaataccttgaattccgtaagatgtcgcttttccgttttccatggaaacgagcacaccctgacgtcggcctccgacttggcctttttgcatcggctgatagctgtcaaacgtgtggttcaggataccgaaaccgcgtgtcagtgacagaaactcagtagaatagccgatgagtccgcgtgaaggtacggtaaagatcaggcggacctggccgtttccgttattaatcatatcaagcatttcgccttttctcgcacccattgattccataacagaaccggtatgctcttcaggcacgtcaatctgcacgcgctcaacaggctcgcagctgacgccgtcaatttccttaatgataacttcaggtttagacacttgaagctcatagccttcacggcgcatgttttcaattaaaatggacaggtgaagctcaccgcgtcctgaaacaacccatgcgtctggtgatgcagtcggttcgacacgaagactgacgtcagtttgaagctgcgcattcagacgctcttcaattttgcgggctgtgacatatttgccttcacggcctgcaaacgggctgttgtttacgacaaatgtcatttgaagcgtaggctcatcaatgcgcagaaccggcagcggctcatggtggtcagccggacaaaccgtttcaccgacgttgatgtcttccatgcccgaaacggcaacaaggtctcccgctctcgcttcttcaatttccacgcgtttcaatccttggaaaccgaagattttcgttacacggaatgatttaaccgttccgtcaagtttcatcaatgaaacctgctgacccactttcatcgttccgcggaaaacgcgtccgataccgatacggccgacataatcattgtaatcaagcagcgccacttggaattgaagaggctcttcggcgttatctaccggggcagggacatgttcaagaatcgtttcatacagtgattccatgttttcgtcctgctttttcggatccagacttgccgttccgttaatcgcagaagcgtagacgacagggaactcaagctgttcttcgtttgcgtcaagctcgatgaacaaatcaagcacttcatcaatgacttcttccgggcgggcgaaatcacggtcgattttgtttacgacgacaaccggatttaagttctgctcaagggcttttttcagtacgaaacgggtttgcggcatgcagccttcataagcgtcaacgactaacagaacgccgtcaaccattttcataatccgttctacctctccgccgaagtcggcgtgtcccggagtgtccaaaatattaatgcgtgtatctttatagttaatcgcagtatttttcgcaagaattgtaataccgcgttcacgttcaagatcgtttgaatccattgcgcgttcggcaatattttcgttggcacggaatgttccggcttggtgaagcaattggtctaccaaagtcgttttcccatggtcaacgtgggcaataatcgcgatgttgcgaagatcgtttcgaagtttcacattttcatctcctaaaaaaattagataactttcatattataccacacatcctctttaaaagcgttacgtttttctgtaaactgaaagtatgacgttaaaggggatggaaatatgaaaaaattgaattggctcttattattatttgcattcgcagcagtcttcagcatgatgctgatcggcgtatcaatcgctgagaaaagcgcatggggcatcatcggaagcattgttctcgttatcgccatgatgggaagcggtttcaccgtaaagaaaaaaatgcgcgaacagggactgcttgattaaaagcatgaccctttgcaaaattccgtaaacatggaaagacaatatcttatgaagcctgaatcaaagattcaggcttttttacctcctcaaaaacagactccagatgtaaggcttatctcccccgccgtctagtcaggaagccgggaatgacggcccccattctagttacatcagcagattccctcagaatatacagtctgaaatagtccggcatcgttatgcagaaaataccatacctcctatatcaattccatcattgtctttttatacttgtgactgtaagcaaatacacatgacaaggagagaatgaaatgaaaacatcttttttgaagaaaaccgctgtaactgccgccgcaaccgcctcagccgccttgcttgcattcagtccgcttgattctgccggcgcaaaaacgatccaggcaaatgaaccgcataccctgcaggtttccgcagagaaaacaccggaagacgcggcaaaactcattgacatcatcagccaatcgatttacgaaaaagacggcgtctattattttgacggtgaaaaagcggttgaattgggattagataaagaagccgcacagaccattcaaaagctgtgggacagttcaaccgaatttttaaccgttctttctcaatgtattgagaaaacggacggcgaatatacatttaataaagaaaaagcggtggagctcggatttacggaaaaagaggcccttatcgttgatcagctgttcaccactttttcccaaagtcttcatatccttcaatctgcgctgattgaagaagacggtgtgtatacgtttgatcaggaccttgctgaaaaagcaggagcaggaaaaaaagaagcaaagctgtgtgccggattctttaattcactgcctcaggacttgcttgaaggcatttatacagcctttcatccggctgagtaaacggataaaacgcccggtcatgtcatgcagccgggcgttttttttaatcagcagtttaaagatcagcatgataaagaaaacagcgccgaacaaacaggctgcttttatcagcagcttcccgtaataccgttccttaaaccgcctttcttcttctgcataacaggcgggctccttcatctcggggctgccgaggtcaagcggctccttcatcatatgatataaactttcgcacttaccgcatgattcaaggtggcgggaaataaaccgctccgtttctgtttcacaatcgccttcaatatatatagggagtaaatctctcactaaacagcaagtcatatctgtccgtccttccttttttccgctaagtgctgtttcagctgcattctcgccctgtacagagtgctcttcaccttcgaaagactccagtccaaaacatcagcaatctcttcgtaagacagctcttgaaatatctgtcgaaatgctgaataaaatgactgaaaatctctgacatctgaaacaatccttttcgtttattaaggcctcacctgtttagacaaacggctataaaaaaagttttacagatcggaacatttttcctctattatttctcccgacttcatttgtcatttttttcagaataaatcgcatcattcgactcatgtttgattcaacacgtgcctctcggcttatcccctgacgctgcccgcctgaagcctttacgggacgattctatcaattcatcagcgaagtctagttttatattgcagaatgagagaatgctggtttattataacaatataagttttcattattttcaaaaagggggatttattgtgggtttaggtaagaaattgtctgttgctgtcgccgcttcctttatgagtttaaccatcagtcttccgggtgttcaggccgctgagaatcctcagcttaaagaaaacctgacgaactttgtgccgaagcattctttggtgcaatctgaattgccttcagtcagtgacaaagcaatcaagcaatacttgaaacaaaacggcaaagtcttcaaaggcaacccttctgagagactgaagctgattgaccacacgaccgatgatctcggctataagcacttccgttatgtgcctgtcgttaacggtgtgcctgtgaaagactcgcaagtcattattcacgtcgataaatccaacaatgtctatgcgattaacggtgaattaaacaacgatgcttctgccaaaacggcaaacagcaaaaaattatctgcaaatcaggcgctggatcatgcttttaaagcaatcggcaaatcacctgaagccgtctccaacggcaacgttgcaaacaaaaacaaagccgagctgaaagcagcggccacaaaagacggtaaataccgactcgcctatgatgtaaccatccgctacatcgaaccggaaccagctaactgggaagtaaccgttgatgcggaaacagggaaagtcctgaaaaagcaaaacaaagtggagcatgccgctgcaaccggaacaggtacgactcttaaaggaaaaacggtctcattaaatatttcttctgaaaacggcaaatatgtaatgcgtgatctttcgaagcctaccggaacacaaattattacgtacgatctgcaaaaccgacaatataacctgccgggcacgctcgtatcaagcactacaaaccagttcacaacttcttctcagcgcgctgcggttgatgcgcattacaatctcggcaaagtgtatgattatttctatcagacgtttaaacgcaacagctacgacaatagaggcggcaaaatcgtatcttccgttcattacggcagcagatacaataacgcggcctggatcggcgaccaaatgatttacggtgacggtgacggctcattcttctcgcctctttccggttcaatggacgtaacggcccatgaaatgacacacggcgttacacaggaaacagccaacctgaactatgaaaatcagccgggcgctttaaacgaatccttctccgatgtattcgggtacttcaccgatactgaggactgggatatcggtgaggatattacggtcagccagccggctctccgcagcttatccaatccgacaaaatacggacagcccgaccattacaaaaattatcaaaaccttccgaacactgatgccggcgactacggcggcgtgcatacaaacagcggaattccgaacaaagccgcttacaacacgattacaaaaatcggagtgaaaaaagcggagcagatttactatcgcgcactgacggtatatctcactccgtcatcaagctttaaagatgcaaaagcagctttgattcaatcagcgcgggacctttacggctctcaagacgctgcaagcgtagaagcggcctggaatgcggtcggcttgtaaacaagaaaagagaccggagaaatccggtctcttttttatatctgaacatttcacaatggcttcaccatgatcatatatgtcttttcccgatcgtctttttcaagcttaagctgttcaaagccgcattggcttaaaaacaaaacccattcctgcctgtccaggggaacggctgaaaacatcgctttatgctctcctctcagccggcccgcaatctcttcaatgaccgcgcgaccgattcctttctcttttgcctccggagcgacggccacggttccgagccacggttttccgtttgaaggcgcccattccaaatgaaaactgacggcggcaggagcgccgtcaatctcccatacgagccacgttccattgtacatggagtatgcaagcataaactccgccgcattttttgttccgaactcttcgtttttccacaccgggtgtgatgccgccagctgctccagaaacccgagatcttcttcttcaaaatctctacctgtcagcatgtaaatagtcgtcaaagataattttatgtatagccggattgcccgcaagcacgctgtggttgtctaaaaacgtgaacggttcgccgtctgtggtcgtgtaaatgcccccgacttcgttcagcagcacgcagccggcagcgtaatcccacggcgcgagcctcatcgtaatgtatgcgtcaatgcggccggccgcaacaccggccagctcaagtgccgccgaaccgtaggaacgcgttcctctgacccgttttacgagcggcgccaaaatactcgggtcaatccttctgttttccgtcacccatgtggcattgattgcaataatggcttcttcaatggaagcttcttttaaaggagcaagcggcgtatcattcagataagccccttttccgctgaatgcgtgatacagttcgtcctgcatcacatcataaattaagccgattttgccttttccgtcttcaaagatgccgatggagatcgcgaaatgccgcttttgatggacaaaattcatcgtcccgtcaatcggatcaatgatccagacgattccgtcaagggagcggagtttatccccctgcccttcttctccgagaatccggtgtccgggaaaagttccttgtatacggtcaatgaaaaagcgctccgtctctttatcaatatttgtgactaaatcattcggatttgattttgtttcaatcgtcaagctttcctgcatggattgtctgattctcgttccggcttcttttacccattgttttgcgatatcatcaatttccgtccaatttgtcataccgtgtacctcttttctatgtatagcttattctatagcatactgataaaggcgatgaaaaagcaaggaaaatgaaaaaaatgccttctcacgtaaaaacgaaccatttcctgcggttcgtttttactattctttatccgttaagccgaatccattcttttctgagacgttccagttttcttttgctgagatcgatttgatcttcattctctttttgcatggcctcgtacagggttgccaattcataatcaacctctagtctccagacagctacacggttatttttttcctccctgaatccttccttcaccacttgcctcattgtctttcgccccttccagagatcatttgttaaaaaagcatcccatttttccaattcattaatgatacttcttatatcgtatggaaacttatattcggctgtaacaacattcttaaaattgtgtgtttacctattcgttttttaccaccattcctctcgactcaaacgttctcaatgtttttgcggcgggcggcggctgtggtaaaatatgaatacttacgttaaggaggaaaaagatgactcagatgcgttttacaaaagaagacttcgatacatttacaatagaaggtttagatccgcgcatggaggtgttaaaagaacaagtccgtccgaagctgaccttgttaggagagcatttcgcaccgacattgtcagcattgacaggagatgaaatgttcccgcatgtcgccaagcacgcgagaagatctgtcaacccgccggctgacagctgggttgcctttgccaacagcaaacgcggctataagaaactccctcactttcagatcggtttatgggacacccatatgtttgtatggtttgccatcatttatgaatctccgataaaagaggaatacggcagattgctggaagcgaagcaggaggaaatcacaaaacagattcccggtcattttgtatggtcgccggatcatacgaagccaggtgcgtacaagcagtccgacatggatcaggagcagctgaaaacattatttgaacgcctgcagacagtgaaaaaagcagagcttttatgcggcattcagctgcaaaaagaagacgtgatcaacatgaacaacaatgaattcctgcaaaccattgaagatgcttttaggaagctttcctttttatacacactgactcagaaagtctcataacataaaaagcgggccgattgccggctcgcttttgtctacattttgataatcgcttgatctgattgtttcgcctgtttcacagtccgatacggggaataggtgctgtcagcttcaaattggctgcagattttcttttcttccgctttcccgggaacgatttctttaaagcggcggtacgcattcagaagtctgtctcggtcagctcctttttcataggcgttttccacctgctgaaaaaaagcaatgacatccacggcctcctctgtcgtccagtcctcattcatcggatattgatattccaaatgtcttcactcctttatcatcatgctcaaaaataagcatcttccatagatcataaattgttctttactttctttcaagttcataatataattcatttgttttacgtttaaaaaacgggtaataaaactgaatgtaatacaaactaatccgtaggtattatgataaaggtgggaaaacaattgccgcaacatgaaacacccctgtacagcggactgaaaaagcacgcggacagacagcctgtccaattccacattccgggccataaaaaaggcgcgggaatggatccggaattcagacaatttatcggagaaaacgcgttaagcatagatttaattaatattgaacccctggatgatttacatgcgccaaagggcatcattaaagaagcccaggatctggccgcggaagcattcggcgcagaccataccttcttttccgtacaagggacgagcggcgccattatgacgatggtcatggccgtatgcggacccggagataaaatcatcattccgagaaacgttcataaatccattatgtcggccattgtattttccggagcggtgccgatttttatacacccggaaattgacgatgagctcggaatttctcacggcattacgcttgagtccgccgagcgggctttgacggaacaccctgacgcaaaaggcctgcttgtcatcaatccgacatacttcggtgtggcagctgacttgagcagcattgtaaagctcgcgcattctttcgatgtgcctgttcttgtcgatgaagcgcacggcgtgcatattcattttcatgataagcttcctctgtccgccatgcaggcgggcgctgatatggcagccacaagcgtgcacaaattgggaggctccctgacgcagagctccattttaaatgtgagagaaggccttgtttccaaagaaagagtacagtcgattttaagcatgctgacgacaacgtcaacatcctatctgcttctcgcttcactggatgtcgcaagaaaacgcctcgctacagaaggccgcgatcttcttgaagatacgattctgctggcggatcagacacgggaacgcctcaatcaaattgaaggcatccgctgtgtcggcgaagaaatcactgggtcaaaagctgccttcagttatgatccgactaaattaatcatttcggtcaaaaacctcggcctgacgggtcatgacgttgaaaaatggctccgcgaatcatttaatatcgaagtcgagctgtccgatttgtataatattttatgtattttcacccccggagacagagcaggagatgccgaccgtcttgtaagcgcgcttacagacatttcaaagcaggcttccgcaaatgattatgctcatcagcaaacggaagttctgcttcctgagattcctctgttagcgatgacgccaagagacgcgttttacgcaaatacggaagtcattccgttaacagaatccgcgggacggatcattgcagagtttgtcatggtgtacccgccgggaattccgatctttattccgggtgagatcattactgaagaaaatatcagctacatttttaaaaacttggacgccggccttcctgtgcagggtcccgaagatgccacgcttgaaatgatcagagtcatcaaagagcaaaaagccatccaataaacataaagaagcccgaaacgaaatcgtttcgggccttttttacgctttttactcttcttcaagatgacactggcattgtccgcagcatgttccgtataacgtcgtgaccttctcatcctcaaagtaatgaatcgcttcgttacagtcttggcaaacaattgtacccatctgtcattccccatttctcagaatttgaaaacgcttaatttttacttgttgttattatattattatgtcacatttaatatgtcaactgataaattgtataacacatttattttttacggtctttttatagctcgagggttaatcacggtatatcctttatgacgcaatccttttacaatgtccggcatggcttcagccgtccatttccggtcatgcatcaatatgttggcgccgtcccgcaggtaaggactgctcagtgtgatatcggtaagcgcttttttggattgatatttctgatcccaatcatacccgaaggtccagttcattttcaccataccttctttttttataagtctgtcactgtagtccgtattgcttccgaaaggcgccctgaaaaatgcgggtttctctcctattaccttttcaaccgctttattgacgccaatgatttcttcccgttgtttttgttcggaaagatcttttaagttttgatgagtcattgtatgatttccgatcataaaacctaactcatgaatatgcttaagcgctttcttattttcatcttttttcaaaaaatgtccgtttacaaaaaagatcgctgacgcattgagatcatgcagtttgtccgcaatctcagcggcatgctgatcaggcgcgtcatcgatcgttaccaatgcgatcggttttttctctttctgttcatccattttttccacagaaaaggttttcggattgatatagtaacggggctccgccttctgttttttctcttttgtatgatggttttcccgtttggcatgattggccgcggcttgagaatggggtttgtttgtttgcatcttttcatttgattggcagccggcgagtaagcacatacatatgacggctgcaatggctttatacatgcaatccctcctgatatggttttgcccccagtataacgaaaaaacagcgctctcacgaaaaacaatgtgccttttttacacatcggctgtgcaagttgtcacacgtattatttcttcattaaaaacggtttcaattatataacaattcagtaacaagccttaggtttttcacctctcgtgatacacttaatatagtccttataaatggatgaaccaatatattatataaaacagaggagtaagatagatgcgctaccgtacggtgattcccttttttttgatgctgttcgttctgtcaagctgttcggtttctactgtcattccattcaaaaataaccggatcgacagcattcatcacactcaaatcttgtttttttccgatgaaaatcatatagataaagaagttccttattacgatgcgattcttgatttagaaaagaaatatccccatcatgtcgatcaaatgaaggtttatgacaacagaaagggatgggaagaggaaatcaacacgttccctgcgctgatggtgatcaatcatcggcatgtggtcatgaagattgagggatccgtaaagaaaaaagaggatatcatcaaacctatgcagcatgtgcttgcacaataaaaacagcccccgcttttacaaacgggggctgtttctttgttacatcattattttacgatgtggatcgggcttccgattgctacttcggcagcttccatagtgatttcgcccaatgtcgggtgagcgtgaattgtcattgcgatatcttcagcagtcattccgccttcgatcgccaggctcaattcagaaatcatgtcagaagcgcttgcgccggcaatttgcgcaccgattacaagaccgtcttctttacgggtgatcagcttcatgaagccgtcagtttcgttaagagacagcgcacgtccgtttgctgcaaacgggaacttagctgcaacgacttcaatgccttcttctttcgcctgtgcttcagtgtaaccgacagaagccagttcaggctcagagaatacaaccgccggaataccgaggtaatcgatttcagccggctctcctgaaatagcttccgcagcgattttaccttcgtaagacgctttgtgagccaaaggaggtccgtcaatgatgtcaccgattgcgtaaatgttcggtacgtttgtgcggcactgcttgtctgttttaatgacaccgcggtcagtcatttcgataccgacttgctcaaggccgagctcatcagtgttcggacggcgtccgacagtgattaatacgtaatcagcatcaaccgttttttcttcgccttttacttcgaatgtaactgttacgccgtcaggtctttcctcaacgcctttagccatggcgcttgtatggatttcaacgttgccttttttcttcagtctgcgggtaacgagagaactcatttgtttttcgaagccaggaagaatttcatctccgccttctaaaataaccaattcagttccgaagttcgcatacgctgttccaagctcagtaccgatatatccgccgccgataacaacgagctttttcggaatttctttaagcgccagtgcgcctgtagagttcagaacgcgttcgctatatttgaagtttggcaattcgataggacgagaaccggtagcaatgatcgcgtttttaaatgtgtatgtttgcgcagagttctcatccattacgcggacagagttgctgtctacgaaataagcttccccgtttacaacgtccactttatttccttttaaaagacctgcaacaccgccggtaagcttatttacaacagaagctttccattcttggacttttgtaaagtcaaccgttacgttctcagcagtgattcccatgtcatctgaatgttttgcattctcgtaacgatggcctgcattgatgagcgcttttgaaggaatacagccgacgttcagacaaacgcctccaagagttgctttttcaacgactgttactttttgtccaagctgagcagcgcggatggcagctacatagccgccgggtcccgcaccaatcacaagagtatctgtttcaatagggaaatctcctactaccataacattacgcctccattaaaataagttgtggatcgttcagtaaacgcttgatgtggtttaacgcattttgtgcagttgctccgtcaatcatacggtggtcaaagctgagagaaagagctaagacaggagcagctacaatttcaccgtcacggacgatcgctttttcagcaatacggccgataccgagaatcgcaacctctgggtggttgataaccggtgtgaaccattggcctccggcagaaccgatatttgtgatcgtgcaagaagcgcctttcatttccgcaggtgcaagcttgccttcacgcgcttttgtagcaaggctgttgatttcatcagagatttcgaaaacggctttacggtcggcatttttcactaccggcacaagcaggcctttttcggtatccgctgcaattccgatgttgaagtaatgtttttggatcacttcatctgttttatcatcaatcgatgtgtttaaaacagggaattttttcaaagcggatgttaatgctttgacgacgtaaggcagataagtcagcttgatgccttgatcagcagcaacttgtttgaactgtttacggtgagcaacaagatttgttacgtcaacttcatccataagagttacgtgcggtgcagtatgcttagagttcaccattgctttcgcaatcgctttacggataccgctcattttttcgcgtgtttcagggaattcgccttcaggagcctgagctgctgcaggtttagctgtttcctgaggtgcagctgtttcttgcggtcccgcttcttgagccgctcctccatttgcaaagctgtcgatatcttcttttacaacacgtccgttattgcctgaacctgttactttacggatatccacgcctttttcacgggcatatttgcgtacggaaggcatcgcgatcacgcgtttgttcggatcagcttccgcttggtcctgctgtcctgcgccggtttcttttgcaggctctttaggagtctcttctttagagatatcctgccctgcttcagcagacgactgaacttgagcctcagttttcgcctctcctgaatcatggcttcctttaaattgaagatcttcgtaaccaggtgcgtcaaacgtaataatcgtttgtccaacagttgcaactgttccctcttcaacttttaattctaatacttttcctttaacaggtgaaggaatttctaccactgctttatcattttgcacttcagccagaacatcgtcttcttctacctcgtcgttcggcttcacaaaccattttacgatttcgccttcgtggataccttccccgatatccggaagtttaaattcaaatgccacagttttcgacctcctagttgattaagcaaattttagttatgcatacgcaagcattgaacctagtaaacagactccttcatcataagagaaaaggactctctttaccgtcttttaagatgcctgattaaaattcaagaacttttttcgcagtttcaagaacgtctttatggtttggaagccatacgctctcagcaagcgagaaaggaaatactgtatcaggcgccgcaacacgcagaaccggagcttccaggctcagaatcgcgcggtcattgatttcagctacaacgttggcagcgatgccggcttgtttttgagcttcctgcacgacaattgcgcggcctgttttttcaacagaagcaataatcgtatcaatatcaagcggacttacagtgcgaaggtcgataacttcagcagaaacgccttctttttcaagctcttcagcagccttaagcgactcatgaaccatcgcgccgtatgtgatgatagaaaggtcagtaccttcgcgtttcacatcagctttgccaagctcgattgtgtattcctcttcaggaacttcctgacggaaagaacggtaaagtttcatatgctctaagaaaacaaccggatcattgtctctgatagaggcaatcagcagtccttttgcatcgtaaggagtggaagggataacaactttaatacccggctgctgagcgataaggccttccaaactgtcagcgtgaagttcaggtgtatgaacccctccgccgaatggagaacggattgtcaccggagaagtccagcgtccgccggaacggtagcggagacgagccatttgtcctgagattgaatccattacttcatatacaaatccgaagaactggatttccataacaggacggtaatcttgcaggcctaaaccgagagcgagaccgccgataccggattcagcaagcggcgtgtcaaatacgcggtcctcaccgaattctttttgaaggccttcagttgcacggaatacgcctccggcaacgcctacatcttccccgaaaagcagaacgttttcattgtttttcagttctgtgcgtaacgcatcagtgatcgcttgaatcattgtcatttgcgccatggcttacttcgactccttcgctttgtaaatttcaagttgttctttcaagttgaacgtcggctcttcaaacatattctcaatcagctctgttactttcggttttgattcgccgtcagcctttttgatagcttgtttgatttcttctttggcctgttcaatcactttgttctcttcttcttcagaccatagtcctttgttttccaagaacttgcggaaacgtacgagcgggtctttttgctcccattcattttctatttctttcgtacggtatttagtcggatcgtcaccggacattgtatgaggtccgtaacggaatgtaagagtttcaatcagagtcggaccttcaccgttaattgcgcgctggcgtgcttctgcggttgcagcgtaaacggctagtgcgtccattccgtctacttgaacacctgtaataccgacggcaactgctttttgggcaattgtctgtgcggatgattgcttttctacaggagttgaaatcgcatagcggttattctgaacaacgaagatcgccggcgctttaaatgctccggcaaagttcattccttcatagaagtcaccttgagaagctccgccgtcaccagtgtaagtaatagctaccgcttttttaccgcgctttttaagccctaaagctacacctgcggtttgaataatttgagcaccaataataatttgaggtgataaagcgtttactccctcaggcatctgattacctttaaaatggcctcttgagaacaggaatgcctgatgtaaaggaagcccgtgccaaatcagctgaggaacgtcacgataacccggaaggataaagtcgtcctgttcaagcgcgaagtgtgatgcaatttgagaagcttcctggcccgctgtcggtgcatagaaacctaaacgtccttgacgggaaagagaaattgaacgctggtctaaaatgcggatatacaccattcttctcattaattcctttaactgatcatctgaaagatcaggcattgcgtctttatttacgacttctccttcagcatttaaaatttggaacgtttcaaactgcttattaatagcatcaaattgttttttgctatcaacaattgaagtttttgtctttgcagccattttttaaaccacctcttcttttgatttaacagggttaggataccgtttagccatccgtattaaaaacagtcttatcatgctctgcaattctaaaattaatcattcagaaattcacatagcgcttaagcaaagataatgacgtttaaactgtactaataaaaaaagattttttattagtacaatatgatcaacaaccatagtttacagtaattaaacaaagccgtcaattatttataaccttattttgaaaccgcttataaaacttaagatcatactgcgccaaactgtactataaaagactttaaactgtattataaaaacgctctactgtactataattaaaaaaaattacaaagagtaaattaagttatttaacttcgagggcaggctttgagaaggtgccgcgggataaaaacgggcagttagcaatcgtcccgcctgccgaacaggcgggacgatgcttttgtctaattattcaatacccgcccacacgatattcagcggcgtcagtacggcatgaggatgaaactcggaaatcggagtgaaaaatacatacgtaaaatcttcggctggatcagaaaacatgccgcaccaacccattccaagatgtgagaacgtgccttctgtcatgaaataatggtcaccggccggccacaaattaatgcctaaaccaaagccgccctcctctcttggcgctccgaagaagtaaaaaggaagaccgggctttatttgatttctcagcatggcctcgactgtttttcttccaagcagcttcttatctttcaatctgcctttatttctaaacatttcagctaacttccaaatatcttccaatgaagagtacagaccgcttgtcgctttattcggaaaatacgggtgatgacttttttccagctgtacgcactcgtgctcattgatcacacaaacttcttcttttaaagcatcaggcacataaaaaaacgttctttctaatccgagcgcttcaataatatgctttgttacatactgttcgtaggacatgcctgttactttggaaataatgatgccaagtatgacaaagccggttctggaatagttccatgcttcatccactccgtactctaaaggcgtactgaccagatagcttatccattcttcctcattcgttaagtcaatgccttcagccttttgaatatccagctcaaaacttaatcccgccgtatgagtcaaaaggtgtaaaattttaatgtctccgaaacccggtttatcaaatgcaggcaaaatgagcttgaccggcattttcagatcgagcagacctttttcgacgagctgcatgacggctgcagcggtaaacacttttgtcaaagaaccgatttctctgattgtatcaagctgaaatgtttgcttttctttttgtccgccggtaaattcccctaacgactcagccgcaaaaacctcgcctcctcttgatatcatataactcgcgcattgcagatctccattgtctatcatcgtctgataatggctgttaagagcgttaatttgtttcatatcaaatgccggattgcttattgtttgtttcattgttttctccccctgtactgtatgtatcgttttcatcccttacttactgatttcttgatgaattctgacaccgctttattaaattcttccgggtgtgtgatgttcggaagatgccccgctcccttaattttctttaattctgcattgctcagcagtttcttcagcctttttgtttctttctgatcaactacgctttccttctctcccgtaaggataagcgttcttgtataaatgtcttttaaaaagccgatcgtagaatagccttcttgttgatgtatcttcataaaacgttcaatagaagcatttaagaattgattcctgtataaactttcatattcatgcgattttcctatagctataaaatcatttttcagtttttcctcaacactgctttcagggtcttcttcgtattcggtgtaacttccggaaagaatgagtgtttttactttttcagggtattcataggctatcctctgtcctatcatgcctccccaagaagctgccgcaatgtggatcggccaagcaacccctatctcgttcagcacttcaataaaagtctgagccagcccgctcagtgtaaaatcggcgctcccctcactcagcccgtaacccggtgtgtgtatgacaattacattaaattggtctgcccactccttcatttgttctttccacatgtaagcagtggtagcaaaaccgcaaatcagtaaaattgtttcacccttaccgctcatcaatatttccatatgccgggcattttctgtgttagccagaaaatgaacggtttccgtttcttctgtctggtaaaaagcgatgagtttttttgcggcatcgctttgatcgtgctgaagggctcctttcttcagtctgctccaataatgcaaataatcgtctagatgacgattggaagctgtgccgagtattcggaaaggactttcagcttcttcttccgtaacgattgacgaagcatcaaaatcggctgcaatcgctgaatctcttaccagaggcggtgctgaacgggcggataacggattgaaattattttgtattttttctttttctccgtataacacgatcagctggtggccttggccgagaagcgagtgttcaaaagctttgattccggcagtattttctaatgggtgaagtccgtactcggttttcataatgtcttgaatgccggcatcaactgacatgcctccgtctttccagaaaggccaatttacagcgatggtttttcctgatctcccccctcctttctcatacattccctccactcggcaaaatgctccagaaaacgattggcgtaggcgtaatcagcttgacccaaacttccgatttctgaagagatggaagaaaacaaaacaaaaaagtctaaaggcatatttctgagcgcttcatccaaatgaatcacaccattgacctttgattgcagcaccgcctgagcttccgcgtctgttttattcataatgaaagagtcttttaacacgcctgcactgtaaatgaccccgttgatttcggaataatcagcatgaattttttccgctaaattgatgacctgctgtttatctgacatgtcagcctggatgtaagaaatgtttgccccgtcatatcggatgctgtctaatttttcttccatttctgctgtcattttcgatcgtccggcaatgataacgctggctccgtgatttgcataaataaacgctgaaataatccagccgatgccgcttaaccctccgattatgagatacactccgttttttacaaactttgcggccttttgccctggttgcagcgaagcatctttgtatgctgtcacccgccttttttgatcgccgtcatatttcacagcctcatgatgtccggcacttaattcattgagaagcaaagatgctttttcaatggtttgtcttgaagaaatctcaaccgttttacactttatattcggctgctccgcattaagcgttttaaaaaagcctccaatcgcggcgtaaatcggatttgtatattgatccttgtcatgtacgtacaaaaggttgatgttatcttttattttttgacggatcaacgctttacttaaataaaggattgaataaaagctgtgagtcaaatctaacgctgcctcagtataagcttgttttgacaggtaatgaatgattgacgccggaaacgctccggactttttcatatcatctaacagtctggtgtaatgagcagactgctccggattaaatttataatgcttttcatttaccatttcatattcagcggcggcttccgcataaataacattttcactgccgatgtactttcggatttcatcactcaatgaactgccgaaatcgaaaatcaatgtattttccttaggcacttctccggactttaatggcgattctatccattctttttgtaaatataaagattcaagcatcggcttttcagacggctctttcgtttgcgttttttctttaaaagctgcggccggcgtattacgcacatcatatttttcttctaaataagctgctaaatcatgaatattgttataatcaaaaagcaatgtcggatacaattgtgtatccaatctttcctcgagcattttcgatatatgcagcagctgttttgagtcaagacccagttcgtaaaaagattggtgtttgtccgctttatttggcggcgtgtttgtcacatctccaataatggatgacagctcatctgttaatgttttttgactgtcttggtgctgaactgtatcagagatagagtctgtaacgcgagctccgtatttctcctgcagatattccgtcaattcaccgattgtggagtaatcaaataataaagtcgggtacagctttgaacctaacaacagttctaattttttagataagtctaataactgtttagaatccaagcccatctcgtaaaaggaaatatcattcttcaccgtttcagcaggcttttcaatcatgccggctatctcttggattaaattatttctgatcatttctttattgttcgttacgctgccgacgtctttagctttttgggaatgctccagcctttgtattgatttttcatttctgactcttttcacaccgaatcgctcataataaaaagcaagctctccatcaggcctgtatacttctatgtccgcatataaaatgtctttagaaggcggctgcgttatactgtttttatcaatatacacaaaacaagacccggttgttttatgcagtgcccggaatgtctcaatatatatagggataaacgcatttgttccttcatccggcaagtctgatgtaaggactcccaacaggctgagagatccatccaaaaatgcggggtgcatgtaaaagtcatctgtatattcttttgaaagtccgcttaaactgacctctcccagaatataattttcaccttcatataccgtaccttccaatttcataaaatctttatgaatcaggccgcccctgcgcaaattacgataggcggcttcagcattcgaagtccggacggcccctttctttaatgcttcgattgaaattgtcttttcgtctatcgcattttttcttatgatttccgcctgcaagttgactgacgcttcaccttccgccttttcagcgacccatttcctgcttgttgtttcaacaagccagccgttttcttgttccgtaaactggaaggtgacttttttatcaaaatggactgacgtcgcaacaggttcacggaataaaacatgtttgatttcaaaacttcggggtgatatccctttctcagctaaaaatcgtgttattaaatccagatacgttacgccgggtatcgtacgcacttgatgaaggacatggtctgaaacaatataatcgtcatgtttgactaatacgctgaacctcatgcaactcgacaacctttcttcttttacaaagtaaagaaacagagcaggtgctactctgtttcatcaataatttcaagaagccgttttttattctgtttgatttgtttttttcgatttgaatccggccagtactcttttctgacaaactcggcaggcggcagcggagttctgacggaatgatatgaatcatccaggccgcttaccaaaaggtgggcgtttgttccgccgaaaccgaaagcgctgatgcccgccctccgttttccatccttccagcttctcagttctgtattcggataaaaaggcgacttttcaaattcaaagcggggatttggcgtttcacaattcaatgtaggcggaatttccttatgccatattgataaaatcactttaatgaaacttgccgctccggcggcgcttaataagtgtccgatattggtttttacacttcctactccgcaaaattgcgttttgtttgtgtctcttcggaatacttttgtcagagcctgaagctcaatcggatctccaatcatcgtgcctgtgccgtgagtttcgacgtagctgactgatccgggagtgatatcggctctttcaaatgcatcttgaataacctgctcttgaagcttaggattcggagtcgtaatccccattgtcgcaccgtcgttattaatagctgatgcttcaatgataccgtatatccgatttccgtcagcttttgctttctccagcggttttaaaagaacagcgccaaaaccctctccgggtacaaagccgtttgccctttcatcaaaagtaaaacactgaccgtccggcgaaagagctcctccttctgttaacatcaggtaaggaatttcatccaaaagcagatccgcccctcctgccagcgccatttctgaatcaccgttttttatgctttggcaggctaaatgaatgctgactaatgaagaagaacaagcggtatcagacaccatgcttggaccgtgaaaattaaagaaatgcgacacatgtgaagcaataaagttttgactaagcccgacgatgtggctgctgctttctttcggcagtttgtgaccgtagccgcccattctggaaccgacaaatacgccgactttttttcccgataattctgtttcttcataaccggcatcacgtacagtctgtacactcgtttctaagaaatgtcttatcagcggatccgtttggatggctttctcctcttccatacggaaatactccggatcgaagctgccgattccattaataaatcctccccatttgctgatgctttttcccttttgctgcaccggagagtaatgttcttctatattccaccgggaatcaggtacttctttaatatgattcttcccttttctcagattgtcccaaaattcctctttatcagccgcgcccggaaacttacatccgattccgataacagctatctttgcagtggaagccgtctgcggttctgtatttcggctcgtcacagactgcatatcatgctgattgctgctttgagaatcagtctgttcgatttgttttttcaacggcggcgccgtcttaccgatatattccgcgagaccatgaatcgtgttgtgttcaagaagcacagtagggtcgatttttttctgaatcattgcttctatacgatgtataatgctgacaagaagtatagaatccacaccgtattcctgaaaatccgtatttgggttaagcttttcaaggggtatgctcaattcctcggcaaatacggcagaaagttcactgacaagcccttctgaatgatcaaaagtgccgggagtctcctgtcttcgggccggaaatgaagtcttgccggttttattgatgttcaggagactgtctgcatgaaacactgttccttttttcacgataggaatgatattggccgattttttctccagtgcatgatacaaaatcgccagtccttcccgcgtggatagagagtccaatcccaattcatcatataaaggactcgtcacagtacccattccgacttctttccagctcggccaattgatggacgtgaaatacgttctccccttttgaaaatgataagccgcgaaatagtccatatatgcatttgcagacgcgtaatcagtcattcctttcgacagtttgggtgactgtgctgcaattgatgaaaacagaataaagaaatccagcggcctattattaaaaatccgctccaaattctgaagtccagtgactttcggcccgtacaccgtcttaaattcactcattcttttatgaataaaggccggatttccgccgctgtgcagtccggcacagtgtatgacaccgctaatatctttaaattcaaggcttacttggtgaaagaatgaacgaagcttctcttcatttgtgagagaaccgctgtaatacagatagtcgacacctttttcttcaaaactttgaaacagttttatattgctgactgtcttttcgtcctgtctgccctctttcagcaaatgatcccattcacttcgcaaaggtaatggacgcgtacccgtcagcacgagttttttcactccccgtttcaccaaatcttcagctattgctctgccaatgccccctgtcccgccggtaatgacgatggctttatccgcaggaaatgaaacaggaccgccgccggtatcgattctttcttcttcaaaatacggaacatatctgacgccgctgcggtagcatacttcattctctcctgtacattgcgccctttcaatctcaaagatttgtttcagcttatgcgtttctttcatgctgtctatatctattgttttcacatgaacaaagccgtattccgcagaaagggctttcagaaaagcagctgattctgcacccgtcagctttggtttttccgctttaaatacctgcaagccattggttagttgtaaaatggataatggtgtttccttttttctccgcttaattatttcttgtataaataagaatttaccatatgggatgccgttctgattttcactctggtttccgatatctgagaaatcaaatatattttcgacctgccgctcaccgcccgagaagatctcacagataacgtcgtatgcgtggttttcatctaataaagaacactcaaacatttgatcagagtgttttatatatgaagagtgatgttttatgacaatcagattctcctgatctatatccggacaaatggtgcgggcaattgattctgtgtcttgattcacaaatgcgactgtcagtccgtactcttttgtttcggatggatttacaaacggattctccctccattttttttgcaagtgatgttgagaagaatgctgagggatctctgtcctctcagtcctggacggaacccaataacgttcttttgcaaacggataagtcggaattgagatccgtttacccggctgctgtaaatgttgatgaacggatttccagtcgatatccgccccccaaacccataattgagccagcttttccgcttcaccgttctcaataatggtctttacaaacaattcgcctgctctgccttccgttaacgccttcattttttcagcaaatgcatctgattgctgattaacatatacgcctggaacttgcttgtcaccgcggcaaaactgagataatttatctttcatttctttaagagaggtaccggtaatcgccgctctggcctccatcgcttctctgcccgattgtgtagtgtatgccagatcccgtaaaacgacgctttccgattggccgccttccatcacttcattcgggaacatgtctcttatcgctccggcatattccttcagtaagtattcagtaaccgcttgaatggaggggcaatccgttaattcatacatcgtgagttcaatatgaaacatttcgttaataaaatccgccatccggcttaattccaaaggccctacgccaaattcactcaggtgatcagaaatattaatttcttccggatggatatgaagcaattccgaaacaaacggtttgagtacttcattcaccttttctttcatatcagtctgtttatcctttacttcaggacttagtgaacgctgaataaaatctttcatgttttcggcatactcaagaagacgttcattgtctttggcagataacaggacaatatgcggttcgttctcaacatgttctgttgagacgtttgtttcttcatattcttctataatgatatgaacattcgttcctcccgctccgaatgagctgattcccgctcttctcggaacagttactgtttttccgttttcctgcagtttcggtttcttccagtcttgcaatgaccgctgtacataaaagggagatgctttaaaatcaatatttggattcaacgtctccgcatgtatggaaggaaacagttttttcagtttcatttgcaaaagaacctttgtcaaaccggcaattcccgctgcggcctcaagatgaccgatatttgatttgacagaaccgattgaacaatattgagtgtgctccgtaaattcccgaaacgcttttgttaatccggtgatctcaatcgggtctcccagagcagttcccgttccgtgagcttcaatataactaattgtacgagggtcaatacaagctttctgaagcgcgtcctgtatcagttcagactgaccatttggattaggaaccgtaaaaccgtttgttctccctccgtgattgaccgctgtcgctttaatcagcgcataaatatgatctccgtcccttaccgcttccgccgccggctttaaaagtacggagcccactccttctcccggtacataaccgtcaccgccctcgccgaatgtacggcatcggccatcacttgcaaagaagcggctttgatttaataatgtatatttattcggatgaagtgtaagattgactccgcccgcaacagcaagtgtgctttctcctcttcgtatactttcacaggctaagtgaatggcgttaagagaggatgaacacattgtatccaccgccatactcggccccttaaaattaaagaaatacgatattctgtttgctattgcagaaaatggagacccgacggccagttcatttcctttaagtgattcttcaacgccgaaaaattgatagcttccatatgtgacgcctgcaaatactccgacctttttgcgggtcagatctgaaggtttataacccgcatcctctatggtattgtacactgtctctaaaaagagacgttcctgaggatcaagaaaagcagcttctttcggtgatatccggaaaaataaaggatcaaaccggtctggatttttcagaaaacctccccacttatagcagcttccctcgagcatttccttccggtcatcaggaatttcgcttacgcaatcccgtccattcatcagcacattctggaactctctgatgttttccgcacccggatatctgccgctgacaccgataatggctatatcagcagaaaggggatcggccgcaatgtgctcttttgaaccttctccttcagagcgtgccggcgcttttgtttccactggttttcttttttgctttttttgatatgaaacaagttcagatttgccggccgggttcagcagtttcatcattcgttcgctgtgatgactcaggaaatattcggctaactgcgatatggaatgatattcaaaaaataatgttttcgacaatctgccgatactttgctccagctttttggtcaggcgcatgatcatcactgaatcaatgccgtatttctccaggtattgtttttcatctatgagtgagaccggtaatttcaattcctctgacattatattttttagataactgatgatattttgtcttaattcatcgctttgtaaatcggcatcttcctgccggtctgaatgtaagctgattgtgccggcacgcttcagcacatcctcaatcttttcttttcggcctttcagggcgatcagctgttcagatgattgacacaagctgttctccagagcctgtattccgtcaccgtcatctagcgggtcaaggccgagttcctgtttcatgtaggatattccttcatcgtcaatattcatcccgccggaagtccatagcggccaattgactgacaccaccctttcggcagactcttttgcggtcataactgctgcatactgatccaaaaaggcattggcgaaagcatagtcacattggccggctgatccgaagactgccgatgtggatgaaaacaagacaagtaattcaactttcatttttttgatttcttccgccagccagagcgcgccataaactttcgaacttgtgacttgatcgatttcttcttttgtctttcttaagataaaagagtcacggagtacgccggcactgtgaaatactccatgtaaggtgccgaactgctcttttgcaaaagcaaacatccgttcagcatcactttgttttgaaacatcagatcggatatattcaactgttgaacctgaacttcttaaatattcgatcttttttttctgctcttcagttaaatcagagcgccctgtcaatatgagattcgctttccatttttccgacagatgttttgccagtatataaccgagaccgcccaggcctcctgtaatcagataattttcatgatgtttcagcggctgggttaaatcgaataagccggctttattatagcttttcgtaaaacgtctgccgttttcatagcgcacttcaaaatggatatcccgtttttcgtcacactctctctgatatatatcagctattgctggaagagcggctcccgcaccctctgattgagtgatattgataatctgatagtgaaaattggggtgttcctggtgaacggttttcaccaatccgccgagagcatgatgcagcggcagttgttctttattctgagtttgaaaaatatgcgtcagttttattatctttttccattttaattcaatcagcgcctgtgtaatatacagaagagaaaacaatccgttttccaattgtttctgtatacctcccttactcatgtcagcctgagaatcagaccacaagtgaagaatcttttcgggcggctgataatgatcatgaatgtatcggaacagctttagataatcgtcttttttcacgtggttcatacaaatcgtatcatcatgtaaaacagcaaattcttctccgcggatgacaaacaagagagtgcagtccttaaacaaaccgctcaattcttgtatttgccgttcattttctgcaaaaatcaggagcaatcccgtcaagggtacgctcttcgtactcggaatgaacgattctgtccattccggcttgtaatataaaagaggatggttcgatgcccgtgatttttgattctgaatggatgttacacgggcatagccttcgtcagccgacatttgtcctgtttgaatcagatcaagaatatcgctgatttgttcacgttttccgttcatcattcttcccccattaattgtttcaatacagccttctgatcaatatcattggtttccaattgacgcaggagacgaatgagttcatcgtccgtctgaacagtgtctttttcatgaccatatctgaatctcacatctctgcactccgccagaatgcttccgtttccatctgtaaatgtcatatgacacgttacatcacggctgttctgccggttcactttttgagtataaacataaaaattttgagcgagaggctgatagacatccgccgctcccattccgatcaattccgggaaggtttctccgctgacaaaaaatgcactggcttgaatcgcggactcaagcgcttcaggagaaatcgtaaaattttctctttttgcataaagctcatccggcattgaatgaagcgacagcattccgtaactgtttttcgctgattcaatgacaaaaggcgcttcagccggatgttcagtcatttctgatttgacttcagcaatatcaagcgcttcaggaagcataccgctttcaggcttaaccatatgcgcatttccgctggcaagacgtactttattctcattttttgtgtttgcatatatgtcaaaccgcgcaaagtcacgctcaggcgtcagcgtaatcatcagttcccgtatatctgtcattccgttcatgctttcggtccacaataaatcggtcaatgtttgaactggttgtccaaatgccgccgctgcattgacgatagccatttcagccaaagatgcataagggaaaaaggacacgtttccttcagacagacttagtgcgaacggatgattacggctgatttttttcgtgaaactgaactgatgaaaatcggacgtgttactccccaagaaagggtggcccgtcttactcacatccgctgaaacaagtgcttcccctttttccgctatccaataccgctgtttgatcagcggttgtcccgggatagaaatcctgcgggcattccgattcacctcaaaagtctcccaatctatctttcttccatttacccatttggatgctgcttcggcgtaatctgaacaaacgtgaggcatttcattgtgaacttctgattcgaatgtattaccggtatggctcaggctgcttttttcacccctgatataagctgaaagctcttcagcaatgacctgcccggaatctgccactatcgccagccgttcttccatatgatcgcgtcccgtctgaagtgtataggcaatatcctgaagacgcagtttatgattgttatccttcgattcattttctgatagaaaatcagccataacctttgcatattttatcagccgttgtttgtcttgagccgataaaacaaagatcactcggccgctttgatgatcaaatgcttttggcggttcatacgcttccaatataagatgcgcgtttgttcctcctgccccaaaagcgcttaccccggctctcaaaggatgaacagcatggctgttttgcggaatattccattcagccgctttccgctgcacttgaaaaggaacctgatcaaaatctataaacggattaacaatatcggaatgcagagaaggaacaagctgcttattcttcatttggagaagcactttcgttaccgcagcgattcctgccgcagattctaaatgtccgatattggatttcaccgaaccgatggcgcaaggatggttcaattgataggaatctttcagtccttgaatttcaatcggatcgcctaatgatgtccctgttccatgcgcttcaatataattgacggtgttcggatcaatgtcagctttacgaagcgcttctgaaatgacctccgcctgcgcatccggattcggtatggaatacccgctcgtctttcctccatggttaacggcgcttcccttaatcacgccgtatatttgatcttgatcttctattgcttttttcaatggttttaacaatacggctccgactccctcaccgggaacgtaaccgcttccgtcttttccaaaactccggcatctgccgtcacttgatagaaactgtcccatgctgaggaacttatatttattcggatgtattgacaaattcactccgccggctaatgccatatcgctctctccgcaatgtatgctttggcatgcgtaatgaatagaggtcaatgatgaagagcacattgtatccagagccaaactcggaccttttaaatgaaaataataagacacccgattggcaattgaagaatagacggaagccggcgaaaaagccgctccattttcttctccttcaaatagttgatattggccccacattgcaccgacaaatacaccgactttcatcttttccagcatgtttctcgggtaccctgagtcttcaaaacaatttttggccgtttctaaaaagagtctttcctggggatccataagttctgcttcccttggggaaatatgaaagaaaagcggatcaaattgatcggctccgctgataaaacctccccacttgctgtaagacttccctttcatatctctgtcttcgctgaagaaatcatctatattccagcggtcaggcgggatttctgtaatacaatcttttccgctctttaaattctcccaaaattcaggtaagtcttcagccatcggatactttccgcttaaaccgataatggcaatgtcttgatgccttgtatcagctgtttcatttatttggatctcacggctttcatcctccttgaaggtatcttgaagtgcagattccaatttttctttgtcaccttcaaacacgatcagctgtgatgcgttcatagagagtgaatcttgaaaagctttgatcccattggttttactaaggggaaccataccgattttttgtttcatccatttttcagtttgtttatccactttcatgccgccgtcttcccataggggccagccgatggctactgagacgccggagcgttcttttttccgcctcattccttcacgccactcagcaaaaagatcgatgaaccggttagccaatgcataatccgtctgtccgatattcccgtacatcgagctgcttgatgaaaacatcacaaagaagtccaaaggttcggtttgcagcaagctgtccaataagaccgtcccatttattttcggagcgatcacttcctgaatttcatcttttgatttttgaatcaataaagcgtcgtgcgtcacaccggcactgtgtatcacaccgttgatttctccgaatttccttttaatagtttttatgattcgctctgcatcgcggctatctgaaaaatctcctcttatatattgaacggaagaaccgcctgctttcattcggctgattttgttctttttgtcttccgtcagttcagaacggcccgctaaaataatattggctttcgtttgcgctgcgatatgttctgcaaatataaggcctaagccgccggcccctcctgtaatcatgtatactccgttttctttaaaggagaaatctgagttttgagccggttctgcttcccgtaaggcacggacccagcgcacatttccttcataataaagatcggtttctcccggatgcgcttcagttgattcgcatctgatgatttcagctgtaagagccggcaacgatgtcttgtctgaaactgatatcccgattgtcttaagggccagtttcgggttctcaagcaaaatagactgccctgcgccatggactgaagcgtaaagcggctgatcatttttatggtccgccggataaaggaaaagcgatacaacctttttttccgccttgctgcgcatcaatgcccggctgaaaaagaatagcgggtaagcccctttagaaagctgttcacttattttttccgggccggcaaatgatccttccggccacccgtacaccacggtgtcgggcatttgccccctttttttcagatcagctgcaagcctgtcaaagtgggcttcctccctgtgatctatctcataaattccgtctccgtgataggagaaacgattccctgataaaacgagaatgatctgtgtattttcgaatccattttcagcattttcccgcataaaatgaaaaagctctctgtcatattgaaacagcagacatgttcttttctttttatttccgcaatgcgggtcccaagcggcagccttttgtctccaatacggcgttaaataggtcagagccgtatgattctctccatgatgtagagggaggtctttgtcaacggaagtcttttcgccgctctccgcaaaataatttgcaagtttttgaatcgtcggatactcaaacaataaagtagggtacagttccctgcctgttttctcctccaatgcctttacggcttgcataagtgtgacggaatccaggccttgttcataaaaaccttttaccacagagagtgtttcaggggcagtccctttgatgtctgcgatcagctgctgaatgtctccttctgttataagagcggaaagattttcgttcttactttctttcatgtcaggcttttcagccggttgattttgcgttaagaaataactggacattttttgattttctttaatatacgcggcgagttcccggatcgttttctgctcaaacaggagtgtaggatacagctgttcccctgttttgttttcaagttctttgacaatggcaagcaaagaagcggaatccaggccttgttcataaaaaccaatgtctgtccttatgtcacgcagatctatatttgaaaccccggatattaattctttaaggtgtgtctcaatgctttcgcttcgatctatgattgaatcttttctcatcaggccgtcttttggctgagaagccgcttcagtttctaaacgagtctgcttcagattttcaattaaatcttttgagcgaatatgtttcacagacagccgtgtaaaataagcgatcatctccccgtgtgcatcgtacaaaccgtaactgacttggatgacatcccctgaatcatgattttggtcttgcttctctatgtacacataacacctgtcttccaggcgcttcgtcatacggaaagattcaatatgaatgggaatatacgttttcatccggcttgccggagatccttgtgtaaaatattcgggacatgcctgataaaggatcgatatgatggtagacgcatcaagaaaagtgggatgcaattgaaaatagccggtatattgtttggcaatttggctgagcgacaactctgcaagtacagaatgatcagacgcataaaccttccccagactcttcataaattcaaaatgctctatatcaaccttttttaaatagtcatagcatatctccatatcggcttcacggacggaggcatgtttgatttcatcgatatgaattgaactcatgctttccgggaatttctgcatgagcctgcagttcatattctcatcccagctttcatccagaatccggtcatcttttacctttctgctcttcgcctggatttcccatccctgttccaatccctgaaaacggatgcggatttctctgtcaaaggtgtccgatgttgctacaggttccaaatacaaaatattctgacactcgagttcttcaataggcaaacctttactcagcgccatacggtatatcatatctaaaaatgtgacaccgggtataatccgggtgccatgcacccggtgatccctgacaatatagtccgtatgtttaattgttaatgtgaactgatagttttgattactggccacctgtctcattccttttcttttctttataattctttgaaatcaagtaaaggaatcagcaattctgactcttccttttctggagcttctccattgtcgatccagcattgttccttattgaatataaccggagaaagcgggtgtctttttgtctctccatatcctaacgtgagatggctgtcgctcaatatcatatgtgcgttcgtgcccccgaatccaaaagaactgattccggctctcaaaatcccttttctgggacgccattcttttaaagacgtgttcggaaagaaaggcgactgatcaaatttaaaacgcggatttggcgttttacaatgtagtgtcggcgggagcatctgattttttatggataaggcaacctttataatactcgctatccccgctgcgctcattaaatgtccgaaattcgtttttacgctgcctactccgcaaaattgcgtttcttccgtaacctcccggaacacttcagtcagcgcttttaattcaatcggatctcctatcatcgtaccggtgccatgcgtttcgacataactgagagtatctgcatctattccgccttttttcagggctttttttatcactgcgctttgcgctttcggattaggtgttgtcatccccattgtctgtccgtcattattaaccgcggaggagtcaattaccgcgtaaattctgtcaccttcggcaagggcgtcatcaagtcttttcaaaaggactgcgccgcatccttctcccggtacaaatccatctgccttctcatcaaatgtatgacattttccttcaggtgaaagcgcccgagcctcactcagcatgacgtaaggcttttgatccagcaaaatgtcaaccccgcccgcaattgccatatctgactcttttgacatcaggctttgacaagcgagatggacgctgaccaatgaagaagaacaagccgtgtctacaaccagattcggtcctttcagattaaaaaagtgtgagatatgcgcgcctatgaaattttgtcctatacccacgatcgtattttttgaaggggaacctattttggacataaacgtcccggtgcgcgaaccgatgaaaacgccgacttctttgtttgatacttcttcctttgtatagccgccgtctctcaatgtctggacgctgacctcaaggcattttttgattaacggatcaagctctgatgcctcacttttgttcatattaaaaaacgcgggatcgaaagactcaatatcttgaagaaatccgccccacttactgatactttttcctttttcataggtgtcagagtagtatgaagaaatatcccatcgcgacgccgggacttcacggacactatgttgtcctttcttcaaatttctccagaatgtttctgtgtccggagcatccggaaactcacagcccattccgataatagcgatttgattcagactggttggttgcatttgagatccgctgtcccgtacttcggaagcattttgatttatatgttgctctttattccgaacctcaatattttctgaatcaatttgaggactgatcccctcacttgcaaataactcgttcaaatagacgcccagttgtgaaaaactcggatactccagaaaagccgaaggttcaatttttatttgaaatgcatcttccgcttttttgacaagctgaaccagtaagattgaatcaactccgtaatccgcaaaagacgtatcctgatctaaattcccgtaaggtattttcagctccgcggaaaaaatctccattaacttcctgatcatagcttcattgtcaccatgaccagagatcactttttcctcagcatccgggttatttttagccgcttgaattcttgtctgaagcagctgcttcagcttgaatttctccggatgtgtctttgccggtataaggcatggatatccgtttatcgtcatgatttcatccagcatggaaatacctgtttctgttgagtgtgaaagtaaaccgagtgcctgatatgatggacttgtcacctcgcccatcccaatgtccttccagctcggccagttaattgattgataatatgttttgccggctgcatgctgatacgccgcaaagtaatccataaaagcgttagccgcggcatagtcacttgttccggcgcctaataaaggaaaagcgctcgcaacagatgaaaacaaaatgaagaaatcaagttcgtcatcaataaaaacgtcatgaagtacttgcatcccctgcacctttggctcaaatacttctcttatttcttgatcagatttatgaataaaagccggattcgaatgattggctgcaccagcgcaatgaatcaccccgccgattttgccgaacttcattcgcacctctgaaaagaagcgatgtaatttttctttttccgtgagcggcccggaatacacttccacctgaactcccttttgatccaactcatgcagcagttgtaatttcgaataaagaggtgacttttcatcggtgtcttctaacatgccggctattttatcagattccggaaggtcggttactcccatcagcacaagttttttgactcccttgccggcataatgtctggcaagttctgctccgatccctcttgttccccctgtaataaccaaggtttgatccgtacggcataccggcagaccggataggttccggtttatttccgccgcatttaatttctcgacgtatggaatataacgatcaccgttccggtagcagatttcactatacagcccgtcagcgcaagcttcatctgtgattacctgtctcagttccgccgcagtcccgacatgcccgtctacatctattgtttttgattttatcttttgatactccgcgctcagcattttatatagtccggctgtttcggctccggctaacgacggcttgtcattcagaagtgtctgcagccctcttgtcacatgtaaaacgaaaagctttttacgtgtctttatgatttcctgcagcagtgtcagcttcccgattgtgccggtgcgtgccccgttttgattactccgcaaatctgacaggtcaatcatgccgatgatttccggattttcttctatgactgctagagccgtttttttggcttccccatccgaatgatcccagttatctgcgcaaatgacagcgggttcaatcagaggatctgaatcaaacaattcgaatgcaagccgctcactttcactattagccaggatcatcacctgtcctttcgtaaaagcggaaggcgcagccttttgttttttccacgatttttttaatacatcaaatgataagtcagtcggtgcatggggcagactctgcggtacacctgttttctgtttctgtgctgcttttgcggcaggcacccaatatctgttccgttcaaaagggtatgcaggaagagaaataagcttcggtaattccgcagtgtacatctcttcccattcaacgtctcctccgttcacccagtgaatggccatatctcttgcattttcaaagtgagcggctgacagggcattcttttgaccggcgcctcggcgggcgtttcccctatataaaccgtttaacttatgatctgaccgcaaatacatcgtcagcttatcgcgaagatcgtcaaggctgctaacctcaacagcgagccgctcttccatagcgtttctcccggtctgcgaagtgtacgcggcatcagctagtgacgtttttggctccagttcttttatatatgcatcaatcaagagtctgagccgttcttcatttttggcagaaagcagaataatttgcgtcttgttgctctgtaccgtttccatcttttcttcattcttgtactcttcgatgataatgtgggcattagatcctccagcgccgaaagaactgatacccgaccttctggcttgattttgcggcgtctcccaatcggtcaattcagactgcacgtaaaacggtgtttcctcaaaatcaatattaggatttaagttatcggaatgaagggaaggagcaagctgtttatacttcatttgcatcagcacttttgtgatagaagcaattcccgccgcggcctctaggtgtccgatatttgacttaaccgaaccaattgcacaacgataatcgcttttcgagctgtgcaaagctttggttaaacctgaaatttcaatcgggtctcccaaagatgtccctgtgccatgcgcttcaatataacttatgctgtctgcatcaatccccgccttatcaagagtttcactgatgacgtttgcctgctcgcccggatttggcacagtgtatccatttgtttttccgccgtgatttacagatgttcccttaatcacaccgtaaatcctgtccccgtcagcctttgcggcagaaagcgatttcaaaagaacggccccgactccttctcccggcacatatccgtctcctcccgctccaaagcttctgcagcgcccatcgcttgaaacaaaatgattttgtgaaagtaaagtatatttatccgggtgtaaggataaattcactcctccggctatggcgagggtggattctcccctttttaaactttcacatgcaaaatgaacagcagaaagtgaagaagaacacattgtatcaattgcaaggctgggtccgtgcaggtcaaagaaatatgacacccggtttgcgatagacgaataagaagacaagagcgcctgacgtccctcatcatctgaagcaccggctgcaaataactgatagtggctgtaggtgacgccgacaaatacccctgtcttatgccgtttcaactttttctttgtgtaacccgcatcttcaaacgtgtgccatgctgtctctaaaaataaccgttcctgaggatcaattaactcggcatcacgaggcgaaattgagaagaacagcggatcgaatttatcagcgtcttttataaaacctccccatttgctatcatgacgggcattgtcacctgtgtgataatatttccgaaaatcccagcgctctttcggtatttccgttatacaatcttttccggaagaaatattttcccaaaactgttccacatccttcgccatcgggtagcggccggctataccgataattgcaatatcttcctcggaaggtgcggatggtatgcgggaaacggaaagcttctcccgtttcgccggcgccgaatgatcaattcgctgttcggctgccggtaaaaacgccttcttcaactcatgttgatagtgttcaagaaaatactctgacagctcttcaacactgctgtattcaaagaaaagagtcttagacactcttccaaaatacttttcgagacgggagttaagacctaaaattgttagagaatcaattccgtaacggtcaaatgtatcctcgggtaaaatgctgtccgccggtcttcccgtttccgcaccgacgatctctgtcaatagacggatcgtttgctttttcagatctttttcatttaattgcggcagactgttgttttcaggcacagtctctatctttttatggtcagttgagagtaattcacttattctatctttgtctccgctgataacagccagctgagaagcagaacggctcatactgtcctgaaaagcggcaagccctgcttgggcagataaaagttccagccccgtgtgtcttaaagcctgcagctctgccggaccaactgtcatattccccgcatcccataaaggccaattaatagaaagtgttttcccgggacgtcccttaatgcttcgatactgggtgaatccgtccatacatccgttagcgaaggcgtagtcgctctgacccgcattaggcagaacggccgaaagggatgaaaacataacgaagaaatcaagaggctcttcttcagctgctttatccagccaaacggttccgaatactttaggcgctataacttcttctatgctttctttcgctttttttatgataaatgcatccttaacaagtccggcactgtgcaaaattccgtttaattctccgaatgtctgcttaatgtgcttaattaacgcgtccgcctctttttcctttgaaatatctgccgggacatataaggcttcagcaccgagattttcaagcgcgctcaatttttgcgccgtttcacgggatgccggagaacgcccggttaataccagcttgacttccgcctgtttcgccagatattccgcaaacagatacccgaggcctccggctcctcccgtaattaaatacacaccgttcttttttacactgaaactatgtttctccccatcttctttttttactcttttaagctgccttttataataatgcctcggctcataacaggtaaagtggtccgtcttgcattgattgttccattcaaaagagatgacatctgcaatatgctgctttgtaaacggctcgtcaaacattgatttcagctctgcagccttacatgtgaaattcggattttcggcctgtacggtcttaagaaaactttcaaccgcgttataaatgggctgaacctcgccctcggcattttcatacagaaacaaaacttctgctttcggacaaagtttgttcgccatgaaggcctgaaacatttgaaacaaggaaaacagacttttattgagctgctttcttattgcatcttctgtatttttgaagagcccggcagctaaaaaatgaataatatggcggggtcttatattttgagaacgcagaaccccgcatagcgcatcataatcctcatcatttgcaaagttcattttaaaacgaccgttccggcaatcttcgaaacgctcgccggaagtcacgtaaatgaaaggcgcctcatagccttcaagctgtctcttcattacggtatacatgctgtcgtctttgcaaaaaaataaaattggctctttcgtattcgggaatttttcactgcctttaaattcatgtctatcccataccatttcatatagatgggttttccccaaactcttaattaattccagcccttcttcacgcgtcaggctgccttctttcacctttttcacgatttgctcaatttgcatcgttttttcattcatggaaaagcaactcctctatcagctctgacgtctctttcgtattcatctcacctgtttgtgctttttcaagaagcgacatgatttctccatctgctgtatctttatttgaattgtgaagctcagtgttcgagaaagcctcaatcttctgcgcttcatctttatttaaatgaatccaatgtctgttcttactgaaaggataaagaggaagaggccgtttaaccggtttgagttcctcctcatacaagtcttcccagctgatttcacaaccgatcgtccacaactgagccagtttggccggcttgttttgctgaatcagtgattgaacatatgcatgaccttcggggccgccgaataaaggagcgtacagactatcaaaatccgttacatttccttcataaacaccttgcagtctgctcccctgaatgtaaccgtttaatttttcaagaagatctccggtattcgagcaagtgatcgcaaggcggcattcaaatggttcccttccggtttgcagcgtatatgctatttcttcaagaccgattccggacttttctctaaaattgccgttatacggtttatcagctgatcgattccagacgctgctgatatagcggcacagctcactcagggtcattaattcctgaaatatatctagtgatatttctgtgccgtacatttggtttatataagagattaattcggaataagccaacggatcaaatccgaattccgaaagaggtgtctttgcatctatatttgcggtatctaaacgcaggatacccgctgccgcttcccgaaccgcctcttgcacatcacgttcctgcacctcttgctgactgaattgaactgatagttcttcatgtaaaaacgctgttaactctttggctttaaccatcagcctttcctttgttttggccgatagaacaatgatttgatcccgctcggcagttactgctttatcttgtccgtattcaaattcttccacgatgacatgagcatttgccccgccgaatccaaaggaactgactccggcgcggcgcggaatttcatttccttttcgatcttttaatctggcccacttcatagttttattgacaatatgaaacggtgttccgcttaattgaatgtaagggttcagctccttaacatgaagtgtggcaggcaatgttttatacttcatggatagtaatactttaatcagccccggcattccagaggcgggctctaaatgaccgatattcgtttttactgaaccgatgccgcaatattggtcatgattctttcctggatgcggctcaaaagatccaaacgcttttttcaagccttcaatctcaatcggatctcccagttctgttccggttccgtgtgcttcaatataagatatcgtatcaacaggaatatcggcatttttgtaaacagacgttattagttctgcctgagcttccgggttcggagcggtcaatgaagcagatcttcctccgtgattttctccggttcctctcaggactccgtaaatattgtctctgtcattcattgccgcttgcaatggtttcaataacagaacagctgcaccttcaccgcggacataaccgtcggcaagtttatcaaacgtcttacaccggccgtccctagacaaaataccgagtttatcggtatacatatgcgtgactggatctaagagcagcgaaaccccgcctgctaccgccagctcactttcgccattttgaatcgagcgcacagctctgtggattgctacaagactgcttgagcaggctgtatcaatggactcactcggacctctgaaattaaaatagtgggatacacgattgctgatgagcgcctggctgtttccggttcccgcaaacgcatgcgccccgtccgaatgcctcatcagcagctggcggtaatcattaaattgaatgcccgtaaacaccccgatatgtttgccggacagctttgaagctttgtaacccgcatcttctatcgctttccaggtttcctgcaaataaattctgtgctgaggatccatgagttctgcttcccgcggattaatattgaaaaacgcctcatcaaatttatcggcatctgtgataaatccgccccatttcgaatgtacttcgctgcttcctttgccttcggcgtattttttccaatcccatcgatccgggggaatttcctgaatcgaatctttttcattgattaaattgatccaaaactcatctgcattttttgctcccggaaaaacacaactcatcccgataatggcaaccggctgcttctccggatgatggtcagcctgtcttgctgtctttttttcaaacggaaaacttcgcggcggcttcacggttttccctgcggttttcccggcgtgcactttccttttttcagaaatatttttttctgcacctgtattcccttttgcaacagtacgcagttcactgtttaggaattctgaaagagactttatatggctgtaagtaaagaaaacggcaggtgtcagcttaagcttgtattttttattcagtctgacagctaatgttttcaaactgatagaatcaaagccgagattgccgaaattctctgccgtatccagctgttcaatgttaattttcaataattccgacaccatttgtttcagttcttcaaggacattgtctgcagaacccggtcctctataagaactttcctcttgacgaaccggaagcgtatttactttttgatgcggcagatctttttttgctggtgttgttccggcatccccggtaacaaccgaaatttgcggacagtcacttgccaaaattgtctcaaaagccgctatcccttcttccgtttccaaataatcaaacccggatgcggaaagatatgcgtcttcagcttctttgtttaaatgcattccgcctttacgccacaacggccagttaatcgaaatgctcttgccttgtctctcttgcctgcggctctgttcggatctccaatttatatattgatcttgaaaataattgcccaacgcatagttaacctgtccaaaatctccgaagaccgaagaaatagaagaaaatacgataaagaaatcaagcggctcatctttcgttaattcatctaagcataccgttccttcaattttagcagtcatgccttccgtaaaatcagtcagattcatctctgtaaataaccgatcatcggcatgaccagctgaatgaataacgccttgaatggatccccaagtccgtttcgtttcttctatgacccatcccatcgtcttttgatctgcggcatcagcttgataatataccgcgtctcctccaagcgcctgcagccggtcaatgttatgtcgtttatcagctgttaacggtgatcttcccgtcaatactaattttgcttgatactgagaggctaaatattttgcaaaaatcaggcccagaccgcccaaaccgcccgttatgaggtaaatccctttctgtttcagctgatgagagtgctctgtatgattgaatacatactcctttaatgtcttaacatacctcttgtcatttatatatttaacttcttccgcctgccgttccacgcctgaaaccatttcgttaagacaaaattcagccattttttcaattgatatacgttctgaaaaaccgattgacttcacattctctgcggatggcaccaacatatttgccgtttttaaacagcctgcaagagcgcccgtatacggatcattcatgccttttttaaaagagtgaacaagaagcagagaatgaagataaagagaggcgtcactgcgggcgctcagggcttttaataaataaaaaattgattccaggccgctgagaaggcggtcacccgcgtaaaatgtttctcccgtgtgcaagatgacatcaggagaaaacccttttttctccaattcttcgaataaacgaatataatctgacgtcacttccgggtttatacagaatgtcagcagattttgatcggtctgccgctgatccggcgtgacgagaatgacacggctgtctgattgatttttcagagcttcagccaacgcttcatcttttgcaaagaccagaattgtttttggctccctatctttcatttcaatcagagggtttttttgatcccactcatgctcataaaaacgtacatttttattaggcttttcgccaaaaaccagcccgctcagttccatcaaaatcccgccggcattgtctaatacatacacatcataagccgaatcgctttcttcagtttgttctgcatatacataaacgggttcagtctcatgatcaaaaatcgtacattctttaatattttccggggtctctccggcattttcccccgcaaggtatacgacggcttgatatgcgctctcaatcacttccggtttgattatgcaccctttcggcccggcctttgcttttatctttaaaagcacctgtccgttcctgctgacgcagtgctctgcggctttcagactgtcactgcagctgtatccgaattcggcaagccgctgataaaacgcttcgtacggtatacggtctgcgccctgagacaggaacggctcaagatgaatatttccgttctcgtacgccccgccttctaattcgagccgccctgaggaataaatggataagtcgctctgtttttctatagaatacgatgcaccctgattatccggggttaatacaatccggatctgctcattgcttccgctttgtaacatcggttctctaaaggagagctcagttaatttaataatcggattccctgaagccatcgctccggcagctctcgccatttcaatctggctgagaaacggaaacatttccttgtcttgatactttgtttttatatacaaaccggtatcgcttacattgataagaaacttctgggctttaaaatcagatatattgcatgaaatgtaaggatgcagatcgttatttacgttcatccggcggcttcccgtattttgcgcatctattctgcatagctctttggcaaatggatatcccggtgctgatacccgtctcaaagtgacatctttataaagtgacagccaatctactccattaccgccaacccagtattcagcaatcttcacaagatccctgtttgcggctgattcttcaatttcagctttgttcgtcctttgagcttctgttgtgtctttgccgcttgtaaaaatatgatccctcgcatttccgagagtatagtctgtcagccctttaagcaattcatctcttgtggaggcgataacagccaatctgtgcggcatttcttctctcccggtttgtaaagtaaatgctgtatttctaagtgtttctaatgaataatctctggctgctatttgttcttttgcgcgttttgcatattctgccagcctgtcggcattttttgcagaaaaaacaaataaaagctgttcaggttcttcagccgcgagaggagagatagcttcatccgcaaattcttctaaaataacatgggcattagctcctcctgccccgaaagaactgattccggcacgcctgggaacggatgactcccatttttcggctctgtccggtacataaaaaggtgttttttgaaacggtatattctcattcaattcagcagaatgagtcagtgacggaacaatcgttttatgtttcatttgaagaataactttcgtaatgcccgctatgcctgcagcagcctcaagatgtccgatatttgatttaaccgacccgatcgcgcatgtcttcttatcgcgttcggcacctgaaaatgctttggtcaggccggtgatttcaatcggatctcctaacgcggtgcctgttccgtgagcttctatatagctgatgcttttgggatcaatacatcctttttttaaggctctcgtaatgacctcactttgagcttttggattcggcacggtatatccattcgtcttagcaccgtggttgatcgctgttgccttaataactgaataaatctgatcaccgtcggcaatagccttttttacgggtttcagcagcacggcacctgtcccttctcccggcacatagccgtctcctcctgaaccgaagcttctgcaccggccatcactggataaaaatcctccttgagtcaggagttcatatttatgaggatgaatggataaattgacgcctcctgcaattgcaatttcacattcattcctgattaaactttcacaggcaaaatgaacagccgttaatgatgaggaacacatcgtgtccaaagcaatacttggcccgctgaaattaaagaagtaggatacccggtttgcgattgatgcaaatgaggaagaaacggccgcttcgtgaccaacgctgtacagctgatattggccgtacataacccctgcaaaaacaccgacgttttttctttcaagcgttttctttgcgtacccggcatcttctatggtgtgccaaaccgtctctaaaaacagtctctcctgcggatcaattaattcagcttcggcaggagaaatattaaagaacaacggatcaaaatgatacacatcgtcaataaatcccccccatttgctttggttttttacttcgtcgcccgccgcaggctgatagtgcagcctcgaatcccaccgatcctcaggtatctcagttatacagtctttaccgttcaataagttttcccacagagtatcaagatcatttgccatcgggtaacgtccgctgataccgataatagcgatatcattgtcatgatacttctcctgctgcacctgatttttcatctggattttctgtttcccgttaacatcggctgtctgtttattatcttttttcttctgagatggagtgccgctcccgttttctcctaaccggagtttatgaagaagagtatccctgtgctcctcaacgaaatactgtgacaattctgccgcagtctgatattcgaataacagcgtttttgagagcgcgccgaaatgtttttcaagctcattcgtcatattgataatcataacggaatcaagtccgtatttttccaatgcctcttctgcatctattttgtccgcaggcatcctgaattctgcagcaattatttttatgataaaatcagatgtttcagctgtcagtttctctgaatcaaatgattcgatatttctccctgttccttcatctgcctgaatattgtcttttcgttcatataattgatgaacatgattgtcaatttgctcatctccgtaaaatacagtgaattgcgaaaaaccggaggacaatgcgacggcaaacgcttttttaccttcttctttttctaaaggataaaaacccgcctttttcattgtctctaccgttcgctcatccacttgcatgccgacttctttccacagcggccagttcagagagagagaaatcgtatcagaatgctgggcagaacgcatattcataaaatgatccatataactgtttccgaacgcgtaatcagattgcccgacatttcccaacactgcggaagtagaggagaagcaaatgaaaaagtcaggattttctttctcaacagcatcattcagccacatcgtacccaatactttcggtctgattacctgatcgaattcctctcgtgacttgttaagaaggaaagaatcccggatgattcccgcgccctgaatgaccccgtttacttttccataagaagttttggcttttttgactacatattcggcttcttccttattggtaatatcagcctgaacataaacagctgaagaaccggcatcctccaatcgcctcagctgttttcttatatgatctgaaagcggagatctacctgttaaaacaaggcagcattttgtttgaaaagccaaatattctgcaaaggtaaatcctaatccgcccgcgccgcccgcgataatatatactccattttctctcagcggcacagctccgcttccggaatttttttcgggttcatacgttttgagctgtttgacataacgctgcatgtctttataacggatctctacatctgaaggctggaaatcactcagctcattgcgtatgatatcagctgcgtgaacggctgctattgactgctccatttcaatgctttttgctgagattaacggattttccagctgtaatgtccgcaaaaatccgcttgccgccgcgtaaagaggctgttctccggaaagatgcgaaaaatatccatataacagcttgatcggtttgcggcagttatttttgaagagcgcctgttgtaataaaaacaaagaatagactccgctgtcgcattgttcacgaattgctctctctgttttttcaaacggcatgtctgaccataaatgcaccgcttcccgtatatctgacttctcttcttctataagccatcctaacaggtttatgtaatctttttcagagcgggggtcgatttcaaatacaccgtccccggtttttcgaaactctttccccggcttaaccaaaataacccttgtatcatgcaatgcagcaagttctttactcacatcttcatttttatcaaataataaaaggctgccctcacgccggccgccttttacatgtatgctgagatctgtccgctgccagaccgtctgataatatatcgcctgtccgttaccccctgcggaatgagaaccaagctgctgtatccgctttactccttcttccaaagaaatgatgccgctttctatgtcagaaagtactttttttctaatatgacgggcttctttcataaaaatcttcatcccctttacaaatggcactgccgcaaaatgataaactaatcctgcatatgctccagcgcataatctgcttcttcggcagtcagttcgcccgcttttaattgtctgagaagctcttttactctctcgttctttccattggaatccgctgttgcacgagtctgtgcctccgcggaaaacgtttcttttttacgaatggttacatccttcaaacctgcaagtctttctccttgttcattaagcagctgaatatcgtaaataagctcggattgacctttttggcctgttttacgcgcatatgcccagcattctgctgaaacttttttccgaatcgtaatctctcctattgaaaaaggaacataaacagatgcctcttctcttccgtccgtaatcccgaacaaagattgcagagccccatcaattaaagacggatgcaatgtataattttcaagagcatatgcggcttcttttggcagcaataagtgtgcaaccgcttctgtttttccgccccataaacgttgaatcggctgaaaagcgcgcccatacaggaacccgttttcccgaaaatacttgtaacattcatcttgttcacggacaaaagcacttctgtttatcatctcttgtctgtcgatattctctatatcatcatcaccgtaatgatgatcataatctaattcccccgtcacaaatccagtccttacagcagcatcctcgtcagatgacatattaaataatattttgccgtcttttacggaaatgtgagtgtaaatggtcagactctcttgcaaaagcatggccggtcttgcaaagatcacgttttttaaacgagtgacctctttctttcgatatgaccgcgttcccgctgcgcatgccatttcaagaaaagcagctgccgggagaatgctcttgttttttacgatgtggtcttttaaccaaatctctttttctcttaatgtcgttttaaaaaactgctgttccagagtagattcattcgaatccagaagcgggtgcagtgaagactgctgcggcaatatttccggaaatattgcgctttgatttcgaggcacccagtaagactcctcagcaaatggatataaaggaagcttgaccttttgcggggtatactcttcatataactctctccattgaatatcagccccgaaagaccataattttgctagaagattcaagtcctttgtctccatcatcacttcgaggaatttatctttcatcttttgatcatgaaagataaagactttatcaaaatcttttgtaacattgcctttgtatacgccctctccaattgttccttcagtacagaaagttctcagcttctccttaagttccggcaaatcggaagctacaacagcaagtctgtcttccataggctccctgcatgtctgcaatgtaaaagcgatatcagctgccgaggctgttgtctcccgctctgtgaattgcagaaggcgccgggcgtattctttcagtctgtcttcatttttggcagaaagaactgcggcaaacggaccgcttattgtttgtgtgtccgcatggttttgatattcctccacaatgacatgggcatttgctcctcccgctccgaacgaactgattgctgctctcctgttagaggcgcctgattctttccgccactcttcttctttctgctgaacgtaaaaaggcgtcttttcaaatcggatattttggttcagctgttccgagtgaatggatggcgccaacttctgatgcttaaattgtaaaagaacttttgtaagggctgctatacctgcggcagactccaaatgtccgatattagacttcactgaacctatggcacaaaattgtttatcatccgtaaatttctcaaaagcttttgtcaatcctgcgatctcaatcggatctccgagcgaggtacccgttccgtgtgcttccaagtagctgacggatcgcggactgatgcccgatttcttgaaattttcagcaatcagctcagcttgtgcattcggattcggaaccgtaaatccattggtttttccgccatgatttacagatgttcctttaatcactccgtatatatgatcctgatcagcaattgctttttccagaggtttcaacagaacggctcccgaaccttctcccgggacatagccgtctccgccctctccgaaacttctgcacaatccttcggtggaaacaaaattaccttgactcagccaaaggtatttgctggggtgtatggatacattaacgccgcctgcaagcgcaatttcactttcccctcttttaatgctctcacatgccaagtgaatggccgtcagcgatgatgaacacatcgtatccagtgcaatgctcgggccggagagattaaaaaagtacgaaaccctgttggcaatagatgaaaagaaggaactgagcgcaatcggattgccccgcgcagtttcttctgcgccgaataattgatattgtccgtacatggctccgacaaatacaccggctttcataccgttaagcttctcttttgtatatcctgaatcttcaaacgtatgccaggaggtttcgagaaaaattcgctcctgagggtccatcagctcagcttctttatgagaaatgtggaaaaacagcggatcgaattgatcaacaccgctgataaaaccgccccacttactgttgattttccccttctccattctgtcgggactgtaattcgatctgaaatcccaacgttcctcggggatttcaataatacagtttttccctccggcaatgttttcccagaactcctcaagagtatcggaattcggatatcttccgctcacaccgataatggcaatatcctcccccggctgatccatgctcggtgcaggtgtatccttctgctgccggtgctgttttttactcggattttctcttttcttctgtactcttgttaccggagctgcccctgcggccttaagcactttttctttaaaagatgttaggaagaagtttgaaagctcttcaatgttctgatattcaaaaaagattgttttcggaagatccccgaaagtatcttcaagctttgcaataagtgacatgatcataagtgagttgattccgaacttctcaaaagagtctttcgcatttattttatgagcttggattttcaagacaccgctgatgatcttgattaaatagtcattgactttttctttcgcagcatattccgcttcttcatcgtgttccgccgtgagtgtatcttgatctgctgcagctgtatttctttgaatcgaaagcgcctttatcattttatcccgctcaccttctgcaggcattaagctggtaaatgaagaccgcagcattttcagaaacgcttccagaacagaggaagttcgcatcggagtcattccgtatttttcttttatttgaacgattccactgctgtcgagactcattccgccatctttcaataacggccaattgattgatagtgtttttccgtttcgagagagctgggatcgaagcattgcaaaactgtccataaaatgatttgcgtacgcatagtcactttggccggcatttccgtaagcggaaaaagaagaaaagagaacaaaaaaatcaagatcttcgtcttttgtcagctcatccagccagattgtcccgtaaactttcggtttcagtacgtccgtaaaatcaccgggacttttatttacaagaaatgaatcacgaaggatgccggcagcatggatgatcccgtttatgctgccgtaccgctgtttaatgccgaaaatgaatcgctctgcctctgttcgatctgttatgtccgtccgctgatattcaacaatagagccgctctcattaagcatactgatccgttctttttgatcagctgttaaaaaagaacggcctgtaagtataatcacggcttgattttcattagcgatgtgttccgcaaacagcagcccgagttttccggctcctccggtaatgatatatatgccgcctttttgatacgttacagatccgttatcgtgttccggaatatcaataggctgcagccctttcacataacgggtatatgagtctattaaaatctcacattcatccgtttgaatgcgctgcatttcactgattgcagcatcccacatctcggaaaccggaggatttatgtcagaatcctcgtggcgtatctgtatggttttcgctttaagcttggagctttccatgtttaccgttttcacgaaccctccgacagcttcatgaaacggctgattcagaccgcttgtccaataaatatgcaataacgtaacaggttcgtttcttcgcattaaagcttttgataataaaaagagcgagtttatccctctgcgaagagattcattaacagattcttcagtgaattctctgatttctctattccataaataaagcacgacatcaggtgtaaatccgttttcagccaaatcagacagcagcatttcgacatgatgttcatcagaaggattgattgtgcatctattccgttcaattctgtaatcagaatcgggcgttacaagaatgacacggttatgttctccattcatcatctcggcatgctgaaaaagacggttatcctgatcaaaaatcagcatattccccggtgcctgctgattcggcatatcaatgtgatttgtcctgacccaatcggtcttaaaaaaaatggttggggacggagcttgtgattccggctccgcctttttttccatttgttgttttctgtaagtacgaattagctccagtcctgcatcaggagacatttgctgttcttcaattaaggaaagtatttgtttgatctgcactattttccctccagcagctgataaacttggtcagcagaaagttcaccgtttttcaattgttccaataagaagagaatttcctgatcttcatttttatgacctgcggttaattctcccccggtcacttttctgacagagaagtctttcatgctcacggctacttcgccgctctcgttaataaaatcaatgttatacgtataaaaaccggtttctctcaccgaaacatggcatcgggcagtaagcgccctcttaatgtgaagctctctaagtgaataaggaacaaataagccgtctttctcattttctcttaacaaaaatgcagccgcttgaaaaccgccgtcaattaatgaaggatggagtgtaaaatgtgaaaacccgttcgctaaatgatccggaagctccaattctgccattaactccacatcaccgcgatatacggctttcaacgtttgaaaaccgctctgatatgtcaggcccatacgactgaagcggtgataacactctttccggcttatgaccgttttactgctgcgtatgaactgatcaatatcgacatactcaggattgctgtttatgtctccgaatactgtttcacattgtgtgcagatttgctgcacgccatccgggccctctttacatatcgttgcgttcaacttatcttgtttcatttccaagccggtataaatgtgcagcgtttttcctttatataatataggtctgttccacatcacgtcttttattttatatactttactttctccgcttatttccgcacaaactagagccatttcaagcgaagcggctcccggcaacacacagtctcctgaaacaaggtgatcagtgacgaaaaattcagttccggaaataacagttttaaatgcttgtttctttaatgttgagacattctcgctgattaatgggtgaagacttttgctattaacctcgcctttgttctttttcggagtaaaccaataactctcttttgcaaacggataagacggcagcggcactctattcaatttctcattgccgatggtcttccattcaaactcggctccattggcccaccattgtgcgagcagctcctcctttccgctttgaagagcctcctgaatcatatattcagaaacagctgcacgctcttcagtgttttcgcttataaatacgccattttgcaccttgcttttatcaagaaagctgacgtatttatctctcagctcagtcagactcactgcacatacggcaattctctcgttcattgcttcccggccgttttgcaatgtaaattccatgtcactggcattaacggtcatgtcaccggcaatcacgcgatccaagtactgaaccataagccggatatactcaagtaattgatctttggttttcgcagataaaacaaaaatgtgtgttttaccgttgttttccggtacttctttttgaggttccctatattcctctaaaacaatatgtgcgttcacaccgccgaatccgaatgagctgacacctgctctcctcggcagatcgttgttctcttcatcttttatcggattccacttttgagcggtttctgtgatataaaatggcgtattttccattttgatgtatggattgagttctgaaaaatgggcgagtcccggaagtttgcgatatttaaaagccagtaacactttcagcactccggctattccggcagcggtttcgagatggccgatgtttgttttcacagacccgattccgcagcttttctgtttctcaaaaggaatgtcccattcttgatataacgttttaaatgcctttatgatgctgtttacttcaatcggatcgccaagacttgtccctgtgccatgcgcttctatatatcccgcagtggcgggactgacccccgccttccgccaagcttcggttaataagtccgcctgtgcgttcggattcggagctgtcaaagaattggcgcggccgccgtgatttacagctgaccctttaatcaaaccataaatatgatcaccgtctgcctgtgctttgctgagcggcttaagcagtactgcagccgccccttcactccttacatagccgtcagcgcttttatcaaacgttttgcactttccgtctttggaaagcatacctgctttatcaaaagctataaacagagtagggcttgtcataatatgcactccgcctgcaatcgccatttcaaaatcgcctctttgaatcccctcagccgcacgatggagtgcaactaatgaacttgaacaggcagtgtcaatcggttcgctcggacccgtcaggttcagctggtaagaaatacgattagccaatatacaatgatttaaaccggttgcggtctgcgcctgaacagagacgccattttcattgagacgttccgcatagtccgttgtggcgacccctgcaaacaccgcggttttcgtccctgccagatctgacggcttatagcccgcatcttctattgttttccatacagtctccataaaaattctttgctggggatccattaattctgcttcggcgggagaaatcccgaaaaacaacggatcaaaactgtccgcgcctttgataaatccgcctttttttatttttgttctattgacgtccctgatcggatcgccgtcaaactctttccagtcccaacggtcttcaggaatgtctgtaatcatatcccgccctttttcaattccttcccaaaagtcttccagcgtatctgtttgggggaaacggccgcttattcccactattgcaaccggctcattcatatgtctttcctcttgcctggttttgttttcaggctcaggggaatgttcataggattccggcggaggcgtgctgtacaatgttttttcgtctgctgcagaaaaaggttctgtctcagcaaaaaggatttctccgtattgctcgattacataatcagtcagttcagccagtgaattgcattcaaagaaaatggacggcaataattccgtaccatattgttgattgatttcatttccgagtctggtaaacgtaatagaatcaaatccgtactcgccgaatgaagtctcttcttccatttcctttctgtcaatctttaaaatactggacatcatctttgcgatgccctcaatcagattttctctcctgtctttcgccgcagattcatctgaagaaaaagatccgcagagatgaagctcttcggaatactcactctttaaaaactcaagaagttcattaaaatcagtaagaccgaaaaaatctgacggcatcattgatattcctaatgtttcgtttaattcgttgcccagcattgtaaacataattgaatcaaatccgtattcacttatcggcagttcaaaatcaaattcccgttcttcaatttttaatacgccggtgatgatgcgcgtcaaagtgctttttaaagattcagttattgacagctctttcggttcgtgattttcgtcggcgattgccgggtcactttttccgctgtcaatcgttatcattcgttccagctttaattcattaccgctaaataccattatttgatgttcacaccctgtcattgcttgatcaaatgctgcaaggccttcccgttttcccagaggcagcattccgaaacggtcataaaggaacttctctgaatgaatgtcaatttgcataccgccttctttccataaaggccaattaatcgagactgtttttccaggtttattttccgccgctctcatttccgcaaagtaatccataaaccggtttgcataagcataatcagtttgtccggcattcccgattattgcgctgatagatgaaaacataacaaaaaagtccagaggttctctgtctgtataccggtcaagccatatcgttccgtaaaccttgctggccaggactgaatcgagatcctcttcacgcttattgatgagtaatgaatcttttatcacaccggcgctgtgaataactcctttaacaggacctaatttgtttttgacgagttttatcaggttgttgacattttccttatcagaaatatcggtttttacataaaaaacttctgatccgtttttttcgagctcttttacattgcttacggcttcctcagaaagctctgacctgccgataagcacaagctttattctcccttttcgcacaagatgtctggcaaaaatcaggcccaggccgcctgttcctcctgtaataaggtaaactcccccttcttttacttccatctttttgggggctctgccctttcaatttctgcagagtgtttcacctgcctgattccatctctgtatctgatctctgaagcatcatcgctgatgactgtttctttcacaaggttttttaattcaggcagaccggtgttcagctgtaactgaatttcatcgctgtgtatttcaatatttttaccggacaacattggatgttctaaatgaagcgacctaaaaaagccgctgattgccatttgataaggtaagatttgattgttccttgtgaaaaatacatgtgatatcagaattttatgtcttgggattgttgctaacagagctttcgttacattgaaaaccggcaaaacagcctcttccagcttttcatgaatgttatgctcaattcccgtttcagggctcatcccgattaaaatgacgcggtcaattgtcacttgtctttctttaagaatcgccagcaatttcttatagccttcaagtttgacgctgttcaattcaaaggaatcagcttctttttcttgaaaacttccgccatggcggacaaagatcatgttcaggccgatatctttatatgcctggcggatcagcggttctgatatatcctgacggagtgaaattacaaggcagctgtttaaaccgctgccttcaggctgatgaagcataggggcccgcttccacatatcagagtaatacttagctgaatgccgctcattttgagtctgcggtgcagcccttaatgccttcaacgctaagttttttattttaagacttacagatccgtgttcatccataaatagtatatgaaaccttttgacatcatcatgttgtctttcatcggcagctgtaatgtaagcatagccgcttgccgaaggtggttgaagaatttccagctcacctaattcaaaaggcaaatatgcggtatgatcgtcttcctgaccggacgtaaacccgattgtggattgaaaaatgccatccaataaacacggttccagcagcccgccggattttttatcaatgctctcaggaagtgatattcgtgcaagaacagcattttcatggataagcagctgttttattacctgaaagccggctccatagtccaaaccgctctgccggaagtttctataacactcagcgccgctgattaatcttttctgtccggttaaccagctgtccaatttaaaatgctctgtatgagaggcgtctttatctccgcatgtcataatgtttccttggcaatgaactgccgcttcagattgcatatcggttttcaccacaaatctgccgtctttttgattcggcagcagatctatcattatcgtcttttctttttcaacggttatcggaaccgcccatacaacctgactcagttttatgactgattttccgtacagcctctctcccgcttctctggccgcttcgatgattgccgctccgggcagaaccatattcccatgcacaacatggtcttttaaataatattcagaatctgaaagcgttttataaaatcggcactcaccggcagaaaaatcaaataaaggagctgtaccggctgctgatgttgtttgcgccttatttgacacccacagtctgttttttaagaaagggtaagtcggcagcgcaatttttgccggttttctgccggtgcggaaatcttcccagcttaaactccctcccgatacccagaattcagccatgtcggctaatgtggttctgccggaattgagcggaagatccgattgccgctgtccgcgtttatgattcggttttttccctctgaatatttcgtgatcgtcaattccattataaaagtgatttaatttcaacatcaggtcatcgatatttttcgaaatgacagcaagcctttccggcatggcttcccgcccttcaagaagggtatatgcaatatcagaaaggtgaagcggcttatttgttcccgccggctgtaaacactcgccctgcttatgacgagccttttgaagatattcctccagcttttttgctgattcccgtaaactcagtgaatgcttggctgagagtacgataagttcttcactttcctcacgccccgtttgacagtcagcagcagactcatactcttccacaagaatatgagcatttgccccgcccgctccgaaagaacttaatcccgcacgccgcggatatttgctgtcagaatgtttttcattcgcgggttttatccagtcggcagtttcctgctggagacaaaaaggtgtctcttccagataaagatccggatgcacccgttcagcatgcagtgttgcggctatttttttatacttcatttgtaaaataatctttgtcaggccggcaatacccgcggccgcttcgagatgaccgatgttagatttaatcgatccgagagagcaatatgaaacatcttcggtataagctctgaacgccttggtcagacctcggacttcaatcgggtcacccagcggcgttcccgtgccgtgtgcttcaataaagctgacacttctggcgctccaaccggccgctttaagagctccttgaattaaatccgcctgtgcggcaggattaggcaccgtatagccattcgtctttccgccatggttaattgccgttccttttatgacggcgtacacagtatcattatcacgtatggcatctttaagcggtttaagaataacggccccgacaccttctccgggcacgaaaccgtcgccgccttctccaaaacttctgcattttcccgattttgaaagcattcccatctgacaccggtataaatagtcagaaggatgaagatacaaatttactcctcccgcaaccgcaaccgagcactcacctttttttaaactttggcaagccatgtgaattgccgttaaggatgaagagcaagccgtatctacagggatactgggacccgtaaaatcaaatgtgtaagacactctgttcgcgagagaccacgggaacgaatttggaagtacatcgtttttgtccgtcggtattctttcgccgagcagcttgtaagaattggttgtaactcccgcaaatacaccgacatgtttttcggtctgctttctcaacccttcaatggtatatcccgaatcttcaaatgctttccatacggtttcgagaaatattcgttcctgaggatccatcgcttctgcttctctcggcgatatttggaaaaacaaagaatcaaatgattcagcattctttaaaaatccgccccatttgcaataaattttcccctcatgcgctttagcgggatctggatcatagtaggtctcataattccatcgttctttcggaatttctgtgattgaggttctctcttttgatagaagatcccacaattcttcgatattttcagccccgggataacggccgctgataccgattaccgctatcccgtcaagatgttctttttcctccgccgcagatgcagtggtgttttgttccggcctggcgggggtaatgctctgaatctgttttcctttttcctcccgtgaaaataaacgtcccagccgatccgggtattcttttacaagatgatctgctaaatctctgattgtatgaaattcaaataaaagcgttttcgaaattgctcccagtgactgctccagctttgtgttgcattgatgaatcataacggaatccattccatattcagccagatgcacatcttgatcgatctcttcccgttctgcaccgacctcacaggagatgatattggttaaaaacaaaactgtctgatccaaaatatcgccttgagccaaaggaacggcactgcctgtctctgtttcgtccgtcaaaaatctctgctgcataaattgttcaaagcgttcatgatcaccgcagactgcaatattatgcagctgacccgaagttacaatccgcgaaaaccattgcgttccgtcttcagcaggaagttcttcgagccctgaaccatgaaaaagagacgtccgcccttgacctgacaggttcgcccccattccgatgtcttgccataaaggccaattgattgtcagggtgcggccgctgcgcagagaattttgccgtttctgttcccgatattcggcaaaatgatctaaaaagccgtttgcatatgcataatcacactgaccttcgttgcctgcaatagagacgactgaagaaaaaacggcgaaaaaatctaattcgagcgacttcgttgcatgatcaagattcaatgcgccatgaactttcggagcaatcacctctgaaagttcatgctttgtttttcgaaaaagcagcgagtctctgataactcctgcacaatgaatgacgccatgaagacctgcatgctgatcggtaataccgtcaatcattttttttaccgcttctttatcggatatattcgcctgtatataataaaccttggctttaaagctgttcaggtattctaaatgtttctgcttatctccgtttaaaacagatcgccccgataggataatggtggatctttcagttttcgcgcaatattcagcgattttactgccaatccccccaaatccccctgtaattaaatatactttatctttttcagggtattgaatggtctttctgtttgtttctctctgcttctctaacatccgtgcatatcttacgcagcctctgtaagtgatatgaatatgccgatcaggcgctgtgtttatttctttataaagaatgtcagccttctctgaacatgaaacggatgcagaatcatgttcaaagcaaaccgtcttacaatgcagctgcgggtactcttgttttaccgattttaaaaaaccgttcacaccttcaaaatacggcaatttttctttttgatctgcgctgaatgtataaatgaacgttactttgtttataaggttctcgctgattaaagccttagtcagataaaacacagaataaattcctgatgcgagtgtttcttccagttcaggctgtttttcagaccaagtatgcaaaattgcatcgggcgctgcgcctttttcctttaacagacgaatgacaccttgataatcttcgggacactgcctgttgatggtgaaaacactgtcgcttatctgctctaaacggtcaccgggcataataagatatgcggacgtattctctctttttttcagctcttcaaaatagtctttattcccggagaacaacaaaatagtacaggcttgtccgctgcccgcttcattctcaagtgcggtttctttccataccggcgtataaagtgcctgattcttcttttctgaaaaagccgcgtctgattttaccggctgagggtttaaagaaaattgagagcgctcaaacggataaggcggaagcggggcttttcttttatgataatcacctagtttcgcccattcaatctcttctcctgaaagccacatttgcataaatgaatgataaagagcctcatcagctggtttgtccgcttcaaaagcagccgctttgtttagttttgctgatggagggagcgatccgaattgaaaaactgaaaaatcagagatattcacatccggctccgttcccttttcttccgtgtgaagcggcatatggtcagctatctcctgaaacacggcatccatctgattgtattctgtcatcagcggaaaacgggccttatcataaaaacctgccggctgctcattcatacaagcaacagcctgtttaattccgtcttgctttttcaataacatgctcagaaaaagttctttagacaagattccttcatccagtaaatttaatatttccagaacataatcattatcaaagaatccatcataatctgttaaatcccatctcttatacagtcttctcatagaggcaaggatagccatgatcgccgcttcctcttcagccggcaatgcgtttcttttatccgccgtgcgattcacaatataagataaaatctcgatttcctgagtctttcccgctttatcccactcttctaaaaaccctttaaacgtatattggtgctcaagaagcagccgtgttttcccgtacaggcggtctgtaaaatcagccgggaagctcagaccgttcagcagcatccttacatattcttcatttaatcgaaccggcgggtacgtttttgaagtgtacggattgacaaatggaatggacggcggctcgcaggataagtgcgaaggtttttcagcgcctgtgatgacagaaatggccttttcaattttgatgatatccgctgctgcaagagcgacgtaatatccgtctccggcgcctgtaatgagacttggcttaaaaccggatgccaggatactttttatgatttccgtattgataactaaagaatacaagcggattttctcaggcgtccattttcttttaaatgaactgtgcaatgctggtatacccttcagcaccgaccttacgttcttttctagatcagggaacacgcgtttcaaaacggcaaattgtttataactttcccatttgaagtcaccgatggcaagcgcccattcagaatcatgtttcctccgaaaacttaatccctctttaagctgatttttaaattcctccttgctgcctgccaataaacccgccctgtaatcaaacgatgtccttgttaaaagggtgctgctgatcgcttcatttgatattttgcaaaattcctcagaatcgtcagaaaaggttctccaattatgtatcatttgtttcatgctttcttcacttttagcggaaaaaaggaagggagcccttacctttctgtcagtttcgtcatttgtatgtataaattcttcgatgatgacgtgagagttaacacccccaaaaccgaaggagctgattcccgccctgagcggagccccgtctgccgccttccaatcacttgaatcaagcgccggcctaaacggtgttttttcaaactgtataattggatttaccgtatgtacattcaggcttttcggcaccctccgatgtttcatcatcattagaacttttatcaatccggccattcccgccgctgcttctgtatgaccgatatttgttttcacacttccgattctgcaatattgagtatcctcagtatattgccgatatgcttttgtcaatgcttctatttctatcggatcgcccagagatgtacctgtaccatgtgcttctacataagaaaccgtcgcagcatcaacagcagcgttgtgtaaagcttctgagatgacccggcactgcgcttctgctctgggagcggttatggaacgggatttaccgccatgattaacagccgtcccttttatgatcccgtatatatggtgaccggcttttactgcatcaccaaggcgctgcagcaatacaacgcctgccccttctccgggaacgtacccgttcgccgctgcgtcaaaggttttacatttgccgtcaggactcagcattctggctttagaaaaagaaatatattttccgggttggaaattcaagtttactcccgatgcaattgcataatcgctttcttttgtccgcaatgacttaaccgcttcatgtaaagcaacaagcgacgatgcacaagcggcatttacagacatgctttttccggtcaaaccgaatgtgtatgaaagccggttggagagcatagcttcgaaacttcctaaacaggcgtaactgtcgatttccgattcatgacctgtctgccggtagtcagaattcataatacccgcaaaaacagaagtggttttacgctggagatcccgcaaagagaccccggaatcttcgatgcaccgccaagtttcttctaaaaggattctttgctcaggatccatgtttttcgcttcccggggagagatattaaaaaacttatggtcgaaatggtcagctttatgaataaaacctccccacttgctgattgttttgttcggtatactgatatcagctgagtaataaagatcgggatcccaccgttcaatcggcacttcccggatggaatctttgccgctatttatgttttcccagaattcatgataatgatctgcatcggggaatctgcaagcaaccccgattatcgcgatatccgcactctgtttattcaaatgaaccattggcctccacccgcccctttttagtgtagaaataacgtatccaatctgcgtcttagcagactttcggtctcattcatcattttttcaccaatgtcatcgacatgtctgtttctccatgattccaactccgtgccctttacccaatggttaaaagcgcctaaagacgggccgcaatgaacttggaaattcaccttttgttcttcctccccttccaaagcaagcagacatcctctctgcaaataccacttaaatagtaacagcatcttatatttttgattgcgctccgctttttgggccaggttcggctgtttttctattatgctttcgtagatttcatcaaaagtcttattaaaataaacattttcgagctgaatctttgtctcttcatctatctcactcaaagactcatattgttggtagatttgaaataatttatttgccctgaccggaaacagcgtgccctttttcagcacctgaacctttgttccgaactcaaacagagtctccgaaggcgcataagcagtatcgcatatttctgtctcactcagcatttctttaacaaaaccgcttgttgcggcttcaactgtacattgattaatggatcccgtcataataaaatcagcgcccattaaaaaagcagacgccgcagactcgggagttccgattcctcccgcggccccgactctgatcttccttgcgtatttatgtgtttccatcatttcatcccgcaggttaacaaaaaacggcagcatcgccgtcaatgagccctgttcggtattactgccgcaatctgcttcaataatgatatcgtctgctgacggaacacggctgagccactccgcctgctcttccgtcagcataccgtgctgacacattctctttacgatactttggggaggcggactcagaaatgcggccgcaacttccggccgtgaaactttggcaatgatccgattatgaggtatgaccctgccgcttttgtccatcttcaactgatgcgctttgtaataaattaatggcgcgctgacggaaagatacgaagacgcttctattacccgtacgtcatgcttgatatataaatctatcaattccttttctctatcttgatgatccggctcaaatcgcagattcattccgtagggctggccatttttgagtgtctccttaatagaaataagggcctgttcaatttcccttatagttaaacccgctgtgccaaagaaccccagcattcctttcttcccgaggcggatcagcatttcagcggaagagatccctctatgcatcgcacctgccaaatacgcgtatgtcaaaccgtaatcttctttgaaagattgatcacccaatcgggacaccggtgaagccgcaacgctttctatattttcggccatgaggcccttctctttcccgctttcggaattgtccttgttcccttcagaaaacaagagactgtcttttggcgcactaatattaagcggttcctcatctctttgtatggtttgaattaatttagtcagaatgtttccgggaccgatctcttcaaacacagtgacgccttgtcccattaagtacctgatgctttcagtccatttcaccgagtttgttatttgttcaattaaattccgtttgatatcttcttgtttataaggtcttgccgtatagttagagatgaccgggaaattcaattcagaaaaatgaaactccccgataaattccgcaaattcacgctgtgcactttccatgaaacgagaatgaaaagctccgccgacttgcaatacgatataagctttcgccccttctttttcaaaaaaagaggctgcacgctttatctcttctgcagcccctgctatcacaatttgtgaagatgtattgtaattggcgatatctatttggccgaattcatacttttgaagtatttttttatgtgatgctcatccagtccgatcacggcagccattccgccctcggaagcctcactcattaactcgcctcttttagcaaccagccggagacctgtttcaaaattaaaaacaccggccgcaaaaagcgcagtatattcacccagactatgtcctgcaacagcatcagggcgagtatgaccttcttttaaaccctttaaatattgcagtgcgctcactgtataaattgcaggttgtgtatacttcgtatcagtgagcctctctttttcatctgaaaggcataaatcctttatggagtatcctaaaatatgatctgcctttttaatgagctcactgaattcatcgaataagtctctgcccattcctttaaactgcgctccctgtccgggaaagacgtaagcaagcatttgttttcctccttgttccgtatttctgccgtttcttttcgttccgattgtgatttgtttaacatttttcacttcaatttttaaaattgtcatttactctaagcacccggcaccattacttaataagcattacgaagcaaaataaaaaaacctttatgccggataaaggtttaaaagcaaaaagcatgtacaaagatcatattgccgcaaataatagatagaattttctgataattaaaaccgcattttcattctgttttttatatatcaatataataaaaacatcccaacgtgccgaaacaacgattggttttatgtgaatatttccctaaataaatactataccatgatttacatgttgtcaatgggaaacacacgtatataccaattcttcagccgccatttacaggcggctgaactcggttgttatcagttcatcagcccatgccgatatgccttcactatactattcgcggaataatagttctttctctttgttgtagtctttagtaaattgattgaactcatctgcttgtttatgcactttttcgtaaactgagtttactttgccgatttgctcttccagctgcgataatgtgagctttttatctttaatcagtttataaaggtcctgatcaagtgaaatggctttttcgtactttttgtacaaaagatcataagatgcataccttttttccattaaagcgacagcatgcccggctttttcttttactttcttatcctttatttcttgagaagttttttttgcggattcaaatgctttttttgaatcatcaatactgtctttttctgctttcagatgtttttttcgctgatttgcattgctcagagcctgatcagacagtgtgacgattttcttgtaatcatccatattcagtttaaccgcgctgtcgtaaagcttgtgctcttttttctccaatttttccaatgttttctgctctttttgaaacggtttttccgcttgaacggctttttccatcgagtcatgaagcgattcaaccggatcttttcccccgcagcccgcaagcagcatacttgcggcgccgagcgctccgattcctgctaatacctttttttgaatcatattcacttaaaatcccccaatcttgacaatttccactatagaagcccgaacgctttttgacaatagctgagctgtaattggcatgaccgggtaaaaagatgcttacggtgctgtcaaagaatacttgcgtaaaaaattgagaaaacagggcggatgaccatacatctttttggcttttacatagtttatagtagacgccggccctgctgacaaagggtcagcgtaattaaaagaggaggtttttttatgtacggatatggatttggcggcggatttggcggcggatttggcggcggttgctgcggcggatacggttatggcggttacggttatggctgcggcggcggatatggccgcacattcgcattaatcgtcgtattgtttatcttattaatcatcgtcggtgccgcttatttaggctgcggctgctgaccttatacaccatgaaaatcggccggcctgctatggccggccaattgtttcgttgcgccgcgataaagaaattcgctataatttacatattaagctttaggagtgaagtttcttgattactatggaaaatattgtacgcgacggacatcccgcgctcagagagatcgctgaagaggttcagcttcccgcttccgacgaagaaaaacagcatcttgctgatatgattgagtttgtgaaaaacagccaaaatcctgaattagccgagaaatacaagcttcgtccgggcgtcggtcttgccgctccgcaaacagacgtaaaaaaacggatgatcgccgtccatgcagaagatgcgaaaggcactttatacagctatgctctttttaaccctaaaatcgtcagccactcagtggaaaaaagctacttgacgagcggagaaggctgcctgtcggtagacgaacccattcccggctatgtgccgcgctacgcccgcatccgcgtaaaggcggtgacgcttgaaggagaacagattgacatccgcctcaaaggttttccggccatcgtgtttcagcacgaaatcgatcatctgaacggcgtgatgttttacgatcatatcgataaagaaaatccgttcaaagaacctgaaaacgccattgccattgaccgttaaaaaaaccggcacttcccaaagtgccggttttctttatttcaaaaggcccagttctttgacggcccagctgattccctcttcatccaccggctttgtgacgaaatcggcggcagcttttaattccggaaccgcatttcccatcgccaccccggtgccggcaaaacggatcatctcaaggtcatttagtccgtcgccgaatgcataagtgtcacttacgccgtacggaagccgctcaagcactcttttaatgccttccgcttttgaaccgcctttcggaagcacatccgttgacaattcatgccagcggacgtaatcaaactccggaaaagcggcatatgctttttcttcatgtccgcggcagaataaaagcagctgataaatttcttttcctttataaaatgtttcatcaacttcgggataaggcgctttcagactgccgataccttccgagacgtgcggatgtccggggacggtcgttttcatcgtgtcttccgccataaatacgacggggtgctccccttctgccgcctgctttaataaacgcgcaaccgcatcttcaggaagcggatttttataaatgacctcaccttcaaatacgacatactggccgttgtatgaaataaatgattcaatctcaagctcttccagaatcggttttaccataaacggggaccttccgctggcgataaaaacgtgatgtccagcctctttaagcgccgtcacggcgtttcttgcgctatcgggaatatgtttatcatggtcatagatcgtgccgtcaatatcaaaaaagatcagttttggtttcatgtcaatttctcctttttcccgtttatcagtcgtgtctttttcaatatcatcatacagaaagtttttcttccggaaaaccgccttgatgaaattccagttttacccacgaaaacaaattcattttttccgcatactactgctataaagggctttaaaggaggtatacgatgctgcgccgattacggaagaaactcagaagacagtggggcggaatgctccggaaaaaagtcatcgcatagaagggatctttcggtttttgaaagtcccttttttgctcgagactttccttataatccgttttcgaatataatagaatcagcgagtctaacatacggcatttaaggagagatttggatgatttataaggtattttatcaagagaaggctgacgaagtacctgttcgggaaaaaacagattcactttacattgagggcgtttcagaacgggacgtcagaacgaaactgaaagatcagaaatacaacattgaatttgttcagcctgtggacggtgcttttttagaatatgagaagcagagcgaaaattttaaagtattggagttatgagcggaatgaaatttgtaaaaaatgaccagactgccgttttcgccctcggcggattgggcgagatcgggaaaaatacgtacggggtgcagtttcaggatgaaattgtactgattgatgcgggaatcaagttcccggaagatgaacttctcggcattgattacgtaatccccgattacacgtatttagtaaaaaatgaagataaaattaaaggtctgtttatcacccacggtcatgaagaccatatcggcggtattccgtacctgctcagacaagtaaatattcccgtttacggcggtaaactcgcgatcggcttacttcggaataaacttgaagagcacgggctgttaagacagaccaaattaaacatcatcggtgaagacgacatcgtgaagttccgcaagacgtctgtatccttcttcagaacgacacacagcattccggattcatacggaatcgtcgtcaaaacaccgccgggcaatatcgtacataccggggactttaagttcgatttcacaccggtaggcgaaccggccaacttgacaaagatggctgaaatcgggaaagaaggcgttttgtgcctgctttctgacagtacaaacagtgaggtgcctgatttcaccatgtcagaacgccgcgtaggcgaaagcattcacgatattttccgaaaagtggacggcagaattatatttgcgacattcgcttcgaatatacaccgtcttcagcaggtgattgaagcagccgttttaaacggcagaaaagttgccgtattcggacgcagtatggaatcggctattgaaatcggacaaaatctcggttacattacctgtcctaaaaatacgtttattgagcataacgaaatcaatcgtatgcctgccaataaggtaacgattttatgtacggggagccaaggtgaaccgatggcggcgttatcacgcatcgctaacgggacgcaccggcagatttccattaatcccggagatacggtcgtcttttcttcctctccgatacccggaaacacaatcagcgtaagccgcaccatcaaccagctgtaccgtgcgggcgcagaagtcattcacggttcattgaatgacattcatacatccggacacggcggacaggaagagcagaaattaatgctccgcctgatcaaaccgaagttctttatgccgattcacggtgagtacagaatgcagaaaatgcacgtcaaactcgcgactgattgcggcatacctgaagaaaactgttttatcatggataatggcgaagtgctggccctcaaaggcgaagaagccgctgtggcaggcaaaattccgtcaggctccgtttacattgacggaagcggaatcggtgatatcggcaatatcgtgctccgcgaccgtcgcattctttcagaagaaggccttgttatcgttgttgtcagcatcaatatggacgactttaaggtttcggcgggacctgatttaatctcaagaggttttgtatatatgagagaatccggtgatttgatcaatgacgcgcagcagctcatttcaaaccatctggagaaagtaatggatcggaaaacaacgcagtggtccgaaattaaaaacgaaattaccgatacgcttgctccgttcctatacgaaaaaacaaaacgccgcccgatgatccttccgatcattatggaggtctaaaaaaactgcactcattacgagtgcagtttttttattgcagcggaatatgctgaaaggctttgacatcaaacagaccggccgccgtcattttaatatccggaatcaccggaagggctaaaaacgataaggtgagaaacggattgaaatcaccggtgaatccaagcagaggaagcttttcatgaagcacgcccaagctgtcattaacccattccgccgacttatcagacaaaagcccggcgatcggaagcggaacggagtgaagcaattctccgtttttcacggctgttaatccgcccccggtgtcacggagcttgttgattgcttttgccaaatcggcatcgtttgtaccgacggcgatgatattatgggaatcgtgagaaatggttgtggcgatggcgccttcttttaacccgaacccttgtacaatcccgagtcctatcattttttcgccgctgtgccgctctgcgacggcgatttttaataaatcattatctgtatcaggtcgaaacgcgtcagcagacggtgcaggcacttctttttttctcgtctccaaatgattcggtatcatttcgattacattcattttcctgccctcttgaatcggtatatgaaaatccgattcagtcagcggcgctttcagccgcactgtatccaacagtgcctggtccggcgaataggaaccggcagactgttcataaaccgtccgtccgttctcggcaacggtccggccggcgaccatggtcttcgtgacggcagcctcccgtacatctgaaatgaacagcagatctgcgtcaaaacccggcgctaccgccccttttgtttcaaggccgtagcactcagccgcatttaagctggcgagctgatacgcaaggaatggatcaagtcccgcctttatcgccattttgacttggtggttcacacttccttctgtaagcagatcatctacatgcttatcatccgtacaaaagaaaaagcggcgcgcgtttttttcattcaccgccggcagcacgttgagcgtattttttgccaccgatccttcgcgcagcatgacgtacattccccgtctgattctgtccagcgcttcttcttttgtcgtcacttcatgatcatttgacaccattgcggttctgtatatattgatgatatctgaagacagtccggctaaatgcccgtcgatccgctttccgtgacgcttggcatcaagcagtttctgaagcatatcctcttcaccttccgcaacagacacataatccattacttccgcaagcccgagcacctctttctcctgataaaaaggctttaaatcctcggcttttaatacagctcctgagcgttcaaagctagcggcgggaacacaggaaggaagcatgaaacggatgttcagcggcgcctttttcgcctgctctatcataaatgaaatgccttttgctccggaaacgttcgcaatttcgtgaggatcagtaatgacagtagtcactccgtgagggaggacggctttagcaaattcaatcggagtaaccatagaggactcgatatgaacatgtccgtcaataaagcccggaacgatcatttggccttctgcatcaatgacttcttccccttcatattcgcccagcccgacgatcactccgcccgtaatggcgatatctgcagaaatccattcctggttaaatacatccatgatttttccgtttttaatgacggtatcggctttttgtctgccggctgatgcattcagccgttcagccagtgtttctttgttcaaaatgcggcctcctctttttctttatatggtacaatatgctatcggatcgcctgatcatagtcaataaaaattgcagaatataccgcttacatgataaatgtctttctattctgacataataaaagaccgtccttttacggacggcttttcactttgtatgaagcactcttttttcaaatcgggaaatgtccgtaagagagccgataacgatgagaatatcttctttttggatcatttcagtcgccagcggagatacgatcacttctttttctctcttgatggccacgatattaatgccgtacttcgcccggatgtccagatcaagcagtgtgttgcccgcaagcctgctgttggccacgatctccacaatgctgtgttcgtcggacagctccaaataatcaagcacattatttgatacgatgttgtgggcgatgcgttttgccatgtcacgttcagggtggacgatgtgatcggccccgattttcgcaagtactttctcatgataatcgttctgcgctttaaccgtgatcgtgttcacgccgagttcctttaagatcagcgtcgttaaaatgctcgcctgtatattttcgccgattgccacaatgacgtggtcaaagttgcgcagccccaagtttttcagcaccgattcatcggttgaatcgccgatgaccgcgtgtgatgcgattttggcgtattcatttactttatcttcatcaatatccatcgccatgacctcaaggccttcttcacttaatgctttgcaaatacttccgccgaagcgtccgagaccgataacggcaaactcttttctcataacagtactcctttaaacaatatctctaataggaatagtatcacattttcggcaatgagttcatatagcgtttaagcttttctgaaaaggcgggtgataaatacaggtccgctccgcgttcgatttcttcctgatagtgacccggaggcgcaatttcctccgctttatcaagaaccagaaacgtcaggacgcctctgtatacacggccgccggcacacacttctatgaacgcgggacggtatgtgtgattatcaacaccttctcttttgtacagataggttgccgcttcaaacgggagcttgtacagcacgccttcagttcgtcccccgtcttcaacaagatcggctctggaaccgtcaggacgccttaacgtgaatctcgtcgaatacccttcaacaaccgcccctccgaccggctcggcaaagaagtggtcgacccccgcctgtttaaaccgggcattgtccatacaggagccgtaagcgaaataataaaccggactgtcatcctcccgtttcataaaacggtattctttccagtctccgcttttgatacggctgaatgaggcacactggccgggctttacgacatatgcgaaggcggttttattcccggcatccgtcgtcacggcaacctctttccggtcaaaatcagcataatacatatccagcttacggatcatctgatgatctgtttcatacaattccccgtacacaaaagctgtttctgctaaagacgccgcaggctgacctttatccgtttcgtacagcacaccgtttatcgcggcctgctcgcacacacatagagcgcctttcagcagttcatggttttcttcacgcttccgtaacaaaccgtatacaaaaagaagcaagttatttttcctccttttggacagcagccgcttctaacggcagaatcacctgaaacgtactgccttctccatttttgctcttaatgttaagtttaccattatgctccttcagaattcgtaaacaaatcggaagcccgagacccgttccctgatcttttgtggagaaaaacggtttcccgatattttcaagcttttctttcgacatgccgtttccttcatcctgtatgctgatcaccgcgtattcttcatcccgttctgtataaatatgaatattcccgccgtcaggcatcgcttcaatcgcatttttaataatattgataaatacctgtttcagctggttttcgtcaccgttgaccatacaggactcagtctgcctgaaatccttctcaatcacagtgttcgacagcaccgcgttcgtgtcaagaagcgtcgccacctgccttaaaatatggttgagatgatgagcggtaaacgtcacggtctgcggcttggcgagcagaagcagctcccccagcacgagatcaatccttttaatctccgaaaaaataatatcgaaataatccgttctttccggatactgggctttcatcagctggagaaagccgctgactgacgttaaaggatttcttacttcatgggcgattcctgccgcaagctccccggcaatggccagcttttgagattgcatggcaaggcgttcgttcgtttccagaagctcgtcgaccgcttttttccgttcactgatatcagacatcgtccccaggctcccgacaaatttctgtctgcggtcataatacagcttataatggacttctccccaaaagatcgtgccgtctcttttaatatatttggccgtaaacattcctgacggggactgctgcttgatttgggagataatataatcaatgatatgtttttcttttataaaataatcattatacatcgtgcccatacattcgctgatggagtggcccgtaatcgtcgtccaggcctgattcaaatatgtaatattcccttgtgaatccgtctgaaaaacgatttcctgcagattgtccatgatccggtttttctcatctgaaagcgcctttgctttctgctcgctgtccttcagctccgccagcagctgctttttattgtccacataataagccagcagccagacgctgattaatgtgacggcggtaaaggtgatgtcaacgggccagttaatcggattccgttcaatcatataaaataaataatcccaaaacataataaaaatcattgccaagattaaggaaatgatacgcgcttgatattttcccatagtcccacctgccgctaacatttctacatatattgtaacattgttgactgcattattgactaaaaaatgataactattcccaattaattgagcaggttcgcttacttttcccgtgagtttttgcacaagttcataataaaaggacggaatgatgccccgccctttttgctgattatgatctatcttttaacgcttcttcgatttcctcaagcagcattttcgctccttcaggacttaaaataattttgccgttgccgtactcctgattttcggaggtaatttccccggtcatcaagcaaatgccgtgcggcttgtatttttttaagacaattttgtctccgtcaacgaaaaattcaatactatctttaatagcgatatccaatgctcttcgcaattcaatcggcatgacaatacgcccgagttcgtctacttttcttactacaccaattgatttcatagaaatcccctacttcctttaatgtctcttctttatgtccaaggaaaatccttcataaacgtagacgaaaggaacggagcaaaagtttctcagcatccggaaatgaatgttttttacaaaagaaagccttttgaaatacgggatacagactttccctccttttttacaaaaacatttcattcccggcggaaacccccaaaaatcgtggtttttctcagaaactttaaatgtagaatcaattaaatcaggatagggattgggtgaaaacatgtttcaatcaactgagatcggaatcgacttaggaaccgctaatatacttgtttacagtaaaaataaaggaattattttaaatgagccttccgttgtcgctgtagatacaacaacgaaagcggtgcttgccatcggaacggatgccaaaagcatgatcggaaagacgccggggaaaatcgtcgccgtacggccgatgaaagacggtgtcattgctgattatgatatgacaactgacttattaaaacacattatgaaaaaagccggaaaaaaaatcggaatgaccttccgcaaaccgaatgtcgtcgtctgcacgccttcaggctcaacggccgttgaacgccgcgccatcagtgacgctgtcaaaaactgcggagcgaaaaacgttcacttgattgaagaacccgtagccgctgcaatcggggccgacctccctgttgacgagccggtcgcaaacgtcgtcgtagatatcggcggcggtacgactgaagtcgccatcatctcattcgggggcgtcgtatcctgccactcgatcagaatcggcggcgaccagcttgatgaagatatcgcctcgttcgtcagaaaaaaatacaacctgctgatcggggaacgcacggcagaacaagtgaaaatggaaatcggatttgcattgatcgaacatgtgccggaaacgatggaaatccgcgggcgtgacctcgtaaccggtctgccgaagacaatcagactgcagtctaatgaaattcagcacgcgatgcgtgagtcgctcctgcatattcttgaagcgatcagagcgacgcttgaagattgtccgccggagctcagcggtgatatcgttgaccgcggcgtcgtgttaaccggcggaggctcccttttaaacgggatgaaagaatggctgacagatgaaatcgtcgttcccgttcatttggcggcaaatccgcttgaatcagtggctatcggcactggacgttcattagacgtcatcgacaagctgcaaaaagcgattaaataataagattgtgcttcttttttctccggccggctcatattgtgagaactggagaaacattaaggaggaagcatatgcttagagatgtgggaagacgcgtagcagtagccgtcattttaagcggaattattttgggggtatgagcatttcactggccaatatgccccattctccggccggcggcgccgtaaaactgaatcatccgtaaagacgcagcaaaagctgtgtctttttcgtttgtgctccttcctttcctttatgaggcgatatttgatatgatgagaaaaaccgatgaggaggaatgaacgatgagttcgtttactgaaaagttaaatacatatgctcagctggcggtagaagtcggcgtcaatgtccaaaaaggacagcatgtcgtaatcaatgcctcaactgatgtccgggaacttgtcagactgcttgccaaacattcttatgaaaaaggcgcaaaaaacgtcaccgtaaattggcaggacgatgaactgtccagattaaaatacgagatggcaccttttgaagcgtttgaagagtatcctgaatgggaagcaaaaggaaaagaagagctcgcgaaaaaaggggctgcgtttatttctgtcgtctcatccgaccccgacctgttaaaaggcgctgacggcaaacggattgcagcgttccaaaaagccgccggaaaagcattgcatacatacagacaatatattcaatcagataaggtcagctggacggtgatcggagcggcttcaacaggctgggcgaaaaaagtgttcccggatcagccggaagaaacagccgttcagcttttatgggaagaaattttcaaaacaacccgcgtaaatgaagaaaaccctgtggcagcatggaaaaaacacgatcaaaatcttcatgaaaaagtggaacacctgaacaaaaaacattacagcgccctgcattatcaggctgaaggaacagacttaaccattgaactgccgaaaaaacatgtatgggcaggcgcgggaagcgtgaatgaaagcgggcacgaattcatggccaacatgccgacagaagaggttttcacccttccgcagcgtgacggggtgaacggcacggtttccagcacgaaaccgcttagctacggcggcaacattattgataacttcactcttacctttgaaaacgggcgcattgtcgatgtgaaagctgaaaaaggcgaggagattttaaaaggcatcgtcgaaaccgatgaaggctcacactatctcggtgaagtggccttagtgccgtacgattcaccgatttcacaatcaaatattttattttacaacacactgtacgatgaaaacgcctctaaccacttggcgatcggcagtgcgtatgcctttaatattgagggcggcaaacaaatgacacgggaagagcttgtcaaagagggcttaaatgaaagcattacacacgtagattttatggtcggttccaaagaaatgaatatcgacggcattaccgcggacggcaaaagagaaccgatcttcagaaacggaaactgggcattttaataaaaaaaaggaggcgatcaggcctcctttttatttcgcttcatacatttgcaagttggcgaagacggtttccaaaacaggtgtatcaattgacaagcctttcgctttctcaagcaaaaagccgtgtaaatgatcaccttccgtcaccctgcccttttccatatctctcagcatcgacgatttcatatggtaagacatgcttgtcaatgtgcgataactctcttcttccagaccaggatctttcgggatgccggcagccttgaaaatggctccgatttcagcaaagaggcgctttgccgtgctgcggccgccttctgtttctaaaatcggtccgaccggctgttgaaacagagtggtcactcccgcctgcgcggcaataaacatatattttttccaaatgtccttttcaatatccccgctgatgatgacatccgctttcacgcctgcaaatgcgttttccagctcattcatacgttctgtgcgctccccgttccattcaccgaaaacaaaacggtgggcagcgctcgtatgaagaatttcccctttgtcgttaagggcgctctcaataaagcagaggccgcccagcacctgccgttttgaaaaagcttcaaacagctggttatagtgcctgtatccgtttaaaaaaggaataatgaccgacgaaggcttgacaaacggtttgacatcccgaatgacgtcctgcaaagaatacgcttttgaagcgatgataacggcgtcaaatgctccttcttcgcccgccaacattaatttcggcttgattgaaacatcaccttttgcacttttgacggtcaaacccgtttcttgtaattgttccgcccgtttcttgcggacgagaaatgtaacgtcatttcccttttctgcaagacgcgcgccgatatatccgcccactcccccagctccgacaactaaaaacttcatgatgcattcctccgtctcttttcaatttatgtattcctttattgtaatgggaagtcagaagattgaaaacttttttcataaataaaaaagcagagtctcccctgcttctttattacgcgtatagctcttcaagctttttctgcacatccgcgttttcaagaaattcgtcataagacatttgtttgtcaacaatgcctttaggcgttaattcaatgatgcgattggcaattgtctgtacaaactgatggtcatgagatgaaaacagcatagcgcctttaaagctgattaagccgttgttaagcgctgtaatggattccaaatctaagtggtttgtcggttcatccagaattaagatattcgcgccggaaagcatcgcttttgaaagcatgcagcgtactttttctcctccggaaaggacgtttgattttttgttgacttcttctcctgagaacagcatgcgtcctaagaaaccgcgcagaaagctttcgctttggtcatgcggcgagtattggcggagccagtcgacaaggttcgcatcgctgccgtcaaaatattcgctgttgtctttagggaagtacgcctgagaagtggtcacgccccatttaaatgtgccgctgtctgcttccatttccccggaaatgattttaaacaatgtcgtaacggcaagttcgttgcggcccgtaaatgcgattttgtcttctctgttcataataaagctgacgttatcaagcaccttaaccccgtcaatcgtttttgttaagccttcaacccgcagcacgtcatttccgatctcgcgttccggcgtgaaattgacataaggataacggcgtgatgacggtttgatatcatcaagcgtgattttatcaaggagtttctttcttgatgtcgcctgctttgatttagaggcgttggcgctgaatctggccacgaactcctgaagctgtttaatctgctcttcttttttcttgttggcttcctgagaaagctttaaagcaagctggcttgattcataccagaaatcatagttgccgacgtacacttgaattttattaaaatcaagatcggcgatgtgcgtgcacactttatttaaaaagtgacggtcatgggatacgacgataactgtgttctcaaagttgattaaaaactcttccagccactgaatcgctttcagatccaagtggttggtcggttcatcaagcagcagaacgtccggcttgccgaacagcgcctgtgccaaaagcactttcaccttttctgaaccgcctaagtcggccattttcttcgtatgcaggtcttcagagatgcccagcccctttaacaaaatagcggcttcactttcagcttcccatccgtttaattccgcaaactctccttcaagctcagcggcgcggatgccgtcttcatctgaaaaatcaggcttcatataaatcgcgtctttttcctgcatgacttcgtataaacgtttatgtcccataatgacgactttcagcacttcgcagtcttcatattcaaagtggttctgcttcagaatggcaagacgttcgcccggactcatatggacatcgccggtctgaggctccagctcaccggataaaattttcaaaaatgttgattttccggcaccgtttgcgcctattaatccgtagcagttgcccggcgtaaatttaatattgacatcttcaaataacttgcgatccgcaaaacgcaagctcacattatttacagcaatcatttagaatcctccatcgtgtctatcatcattaaaagtataccatgaataaaggggaagagaaatgtttccctgcgaatatacgggtttgaaaagatgcaggcgtcaaacccggagcgctgtgatacaatagatatatatacatattcatcacggaggaacaagttgaagcttttaacactcacagaatactgtcttatgattttcttcaccggggtttttctggccgtcacaggctttacggcacgtgacatcggcttgtacgtcggaatcgccctcatttatacgttttcgcatctcttttccaaacggatgcttgaaagacgcggcaaagagaagaagcaggtgaatcttttttcagcgttctggccattgtcggatcagtgctggccacggtattgttcatcgccgtcgcggcctcgtttgccaaataaaaacgcctgctgtccgaatcgggcagcgcggcgtttttattttgtctgacgcatatcatgaaacgggaagaacacaaacttcgaggtgccgacgatccggttttcggcaattaagccgaggccgttccggctgtccattgagttcagccgattgtcgcccatgacaaagtatttgcctttcggaacctttacggggccgaaatctcccgtcaggttgactcccagttttttcgcttcttttttattgctcgcgaggtacggttctgcgatttttttgccgtttatgtaaagcgtgtcatttttcatttccaccgtttctcccggttttccgatgagccgctttacataatggactttcgatgtatcgccgttaataatgacgatgtccccccgctcgatttctccgatataattgacgcttttgttgacaaacagtctttcaccgtcatgtaatgtcgggtacattgatgatccttccactaagtacggttcaaacaggaaatggcggattaacagcgcaagtgcaaccgctataatgatggcctttccccattcccaatacgtgttggattttctttttaccgatttttcagaagtaggtttttgttcttcagtcaacgtggttcctcctagacgatcactgtttcggttcatgtaccatctttactttatcacaactcatcacaaaatacataacgcttctatgcgtatatgattgaaaaaagcgcccgtaaaggacgcttttcgcttatttctctactaccggttttttgatgattcccaagataaccgccgttacaatcgctccgatcacgatgctcattaagtaaagcagcggatggttcgtaatgaatgcaacgaatatccctccgtgcggtgcaggaagcgttacccggaaaaactctgtcagtccgcccgctaccgcagaaccgacaacggctgcagggatgacgcgaagcggatcagccgctgcaaacgggatggcgccttctgtaacgaaagctgctcccatgaagtagcacgtaataccggcttcacggtcacgtttagagaatttgtgtttaaagaatgttgtcgccagtgcgattccaagcggcggagccattccgcccgccatgatggccgcatgcggcgcatagtttccggcatcgatcatcgcgataccgaaagtgaacgccgctttattgagcgggccgcccatgtcgatagccatcataccgcctaaaataatacccattaagacaaggtttccagttccaaggctttcaagccaatttgttaagaaattcataaacgctgctacaggtgtgttaatgacaaactgcatcaggacaccggtgataaaaataccgagcagcggataaatcaatacaggttttaatccgtcaagagtctgaggaataaagacaaacagctttttcaaaaggactacgacataaccggctaagaatcccgcaatcagtccgcccaagaatccggcattcgcctgcgtagccataaatccgccgaccatacccggcgcaaatcccggacggtccgcaatactcattgcgatgaatccggcaagtactgcaacaatcagctttaacgcattaccgtcaccgataaagttcagcgctgcagcaaacgtgttgtatgtcgggtctttcggatcagctgaatgaattccccagaagaatgaaatcgcaacgagaattccgccgccgacgacaaatggcagcatgttgctgacaccgctcattaagtgtttatagaaagtacttccgatgcttgtgcctgatttctgtttcggaccgtcttcatttgaagcggaagatcctccgccgctgccctcgtaaatcggcgcatcttggttaacggctttttcaatcagttcctgtggacgtctgataccggccgtcacaggcacttgaagaacatgtttgcctttaaagcgctccatttcaacctgtttatcagccgccacgataatcgcaggcgcgtcttcaatttcttgagccgtcagcttatgtttaataccgcttgagccgtttgtctcgactttaatgtcaacgccgagctctttcgctttttctttcagtgcgtcagctgccatgaacgtatgagcgatacctgtcgggcatgccgtaaccgcaaggattttcccttttcctgacggcgctgcctgttcttcctgctcttcttcttcctcatcgtcatctttgtcatgctgattgatgatgtcaatgatcgcatcttctgattcagcttcaagaagctgtttgcggatttcctcacgcataagaagcgttgaaagtcttgataatgcctcaaggtgcgtattgttcgctccttcggttgccgcaatcataaagaccaagtgtgccggctgaccgtctaatgattcataatccacaccatcttttgaacggccgaatgcaatggccgggttaatgacgctcgccgtcttcgcgtgaggaatggcaataccttcgccgattcccgtcgagctttggctttcacgatttaaaatggctgctttgtaagcctctctgtcatttaatctgccggctttgtcaagcactgtcaccatttcatcgataacgttttctttctctttgctttctatattgagatgaattgtatctcttgttaacagctcagttatcttcacttttctttcctcctctatagacgtgtgactttaacttcaggaagaagctgctgtacaaactcttcagttccgagttcttcagaaaatgccgtcgcgcttccggaagcaactcctaaacggaacgcatcttccaaaggcagctgttttgaaattcccgcaaggaatcccgcgacgacggaatcacctgcgcctaccgaattgacaagctttcctttaggaacattggcgaggaaaaccgcctctttcgtaaataaaagcgcaccgtcgccagccatcgaaacaatcgcgtgttcagcgccttgttcaattaattttttaccgtaaggaacggcagcttcggctgaatcaatgaccgtattgaacatttccccaagctcatgatgattcggcttcatcaaaaacggtttcatttctgtcgctttcatcagcgcttcaccggagatgtccaccactacccgggcattctgctttctgcatgcctcagcaattttttcatacgtgttatgcggcagggaagaagggatgcttcccgctaaaacgacgatgtctccctcttccagagcggagaactgttctaaaaaggcattgaacacttcgtctgaaatcgtcgggccctgtccgttaatttccgtttcatcgcccgttttcagttttacatttatacgcgtgtcttcatccacctcagaaaaagccgtttccagaccttcctgctgcaaaaatgacgtgatataatttccggtaaatccgccgacaaaccccaatgcttttgacggcacatggtgtcttttcagtaatctcgaaacgttgatgccttttccgccgggatacttcgtgtcatagctggaacggtttaaaccgcctacggcaaaatcttcaacgtgaacgatatagtcaacagacggattgagagttacagtgtaaatcatggtttcactacctttacgacagttttttcttggtaatcatcgaatgcaagttcttcagcttcagtggtaatgatagctgcatcgcccaaggcggcgaacgctgcgaaagaaatctcgccgaatttagaaggatcggctaaaacatacgcatttttcgcctgtctcacagcctttgtcttcagaagagcctcatccggatcgggtgttgtaaagccggcttcaatgtgcacgccgttcaccccgagaaagcttttgtcaaaacggtactggctgaccgccgttaatgaggcgccgccgatcatcgcacctgttctatgcttcacatatcctccgagaagataaaaaggaatccccttccttattaaagcatcgatatgcataaccccgtttgtgacaaccacaatgtcctttgtatgatctataaaatcaatcatgtgcaatgtagttgttcccgcatcaaggtaaatacagtcaccttcttctaataaagatgccgcttcttcagcgatcttcagtttatcctgaaggtttttggaggatttttcaagcatatcgggttcttgcctgctgttggaaagtttagacgccccgccgtgaacgcgctttaaaaatccgcgctcttcaagtgttgataaatctcttctgatcgttgattcagaagcgtttgtcatgcttatcagctcttgaatcttcaccacatctcgcttttcaatctgatccataatcagctgatacctttcaggagtgagcatattccgcctcctttgaaaacgtattcatttcggctgcaagataattgtaaacgctttttttacttcaagcaactaaaatcactcaaattcattcaataactatcaaaatctttcacatttgttcatattaacgtatgtacatagggtttgtaaactgtaaattcgacaaaaagggggacaattgtatgacattttctttttatcataaatgaaaaaagtctattatattcattcaatcattaaaacacaaaaaaccccatgcagactgcatggggcgccggttattcataccgtaacgcttcaatcggatctaagcgtgatgctttgttggcgggcagcatgccgaagatgacgccaatcagcatactgaacagcacgccgatacaaaccacctgccaggaaacgagcgacggccagcctgcgataagggaaacgagtgttgctcccccgtagccgagaccgattccgattaagccgccgattaaagtaagcacaacagattcaattaagaattgtgtcagaatctgtcctctcgtggcaccgagcgatttgcggatgccgatttctcttgtccgttccgtcactgatacgagcataatattcatgaccccgatcccgccgacaacgagagaaataccggcgatcgaaccgatgatcgtcgtcataacggtcgtgacctgaccgattcccgccgcgatttcttccatattcatgacttgataggcctcttttgtaccgtgattgtcatttaagagacgggccgcttcttttcctgttgttttgatttgatcagcggactccgtctgaacggaaacgttgctgtagtcgttagtaccgaaagacgttttcagcatgttgaacggcacatacatttcactgagtcctaacgataaaaagccgctctcttctttcagtacgccgattacttctacgggctgtccgccggcccagacgattttcccgagcggagacgttttcccgaacagcttttcagccatttttttcgagatgattcccgctcttttcccggaaagaaaatcattgtccgtaaacgtccgtccatcttgaacgtccagcttttttacgtccaagtagccgctgttaatgccgttcagcgtaatatccgtgtcttcttcatggtaacgggccgtcatggattttaccgcggaagcgacaacctgctttacgccgtccactccttttaatccattaatatcttcttctgtaaaactcgcttgctgtaaggcgttcggattggctgttaattcttcatcactgggcatgtaaaacaattcaatcgtattgcccggcccgctgatggattgcttcagcatttgctctccgccctggccgacagccacaacaacgattactgaaccgacgccgataatgattccgagcattgtcagaatcgatctcagcttgtgagctcttacggaactgagggccatccggagattttctgacaggctcattcccccactctcctctgctcagaatcgcgggaaacgatcatgccgtcacggacgaaaatcactctgtttgtacagtccgccacttcaggctcatgagtgacaagaaccacggtcacgccctctgcattaagctctgtgaactgctccataatggaaatgcttgttttcgtatccagcgcgccggtcggttcatcagctaaaatgagcttcggttcgttcacgatggctcttgcaatcgcgacacgctgcttctggccgccggacagctcattcggcatgtgacgcatccgatccgccaaaccgactttttccagcgcgtgctcagcccgttcctcacgctcttttttgccgataccggcgtagatcatgggaagttcgacattttttcttgcattcaatcgcggcagcagctgaaactgctgaaagacaaaaccgattgatttgttccggaccgccgcaagctctttttcggtgcatgaagaaacatcttcgcccgcaagactgtaattgccggacgtcggtctgtccagacagccgatgatattcatgatcgtagattttcccgatcccgagggtcccataattgacacatattctccttcttcaatcgtcaggtcgattgaacggagaacatcaaacgtctccttgccgatctgatagctttttttcacctttgaaagctgaatcatctatgctttcacatccgttccgtcagtcaaaccgtcagccggattcagaatgactttatcatcctttgaaagcccctcttttatctccgtaagctgatttgcggtatcgccgactttaactttcacgcgtttggccttcccgtcttttaccgtaaagacccagtgctcatctccgtcttttttgactgcggaggacggcagcgtgtcggctttccgtttgtcggtttcaatgttcataattaatttaaatcccggcttgccttccggaaggtttccgatcagcttaacctgaaacggatactggacggcttgttccgtgctttcccccgaagcagcgcttgacttttgatccggaacgaggccgacagccgccactctccctttccacgttttaccggggatggcgtctgaggtgattgtaacgctttggccctttttcactttcagcgtgtcgtattcggacaaattgccggcaacgaccaggtgttccgggtctcctatatgtataaccggttcttgaatatccgattttttagaagccgcttcttgatttaccgagataaccgtcccgtccatctcactcttaacattgagattcgacacttgattttcaagagactgcttttgcaaatcagattgctttaattcgatttccgccgttttttgctgaagctgcagatcagtccgttcggattcaatttgttttttggcttccgcttctcccacttgttttgccagatcttgttccttgctgtttaatgctctgagtttttcttcaacttgttcgatttgcatccgttttgattgttctgtcaactcattttgttctttatcaaggttgagctgctcatttgtatacgtgactaacgacgaccctttttttactttgtcgccttcttttactttcactttatcaagagttcctttatctgcttcataaaaaacatactgttctttagaaaatttaagtgttcccggaaccataaccgtagatgagatttctctgttttccatggttccggtttcgattttttttccggcgctgccgcccgcgggagcggcagacttataaatattgataccgataaatactgcaacaattacggcgatgccgattccgatccaaatttttttcatgttatacacctgctgtcactgaacttaacagtcctccgactgccgaaaccaaaagcataataacaaacaggacaatcgcggaagtccaggccgcttttttcgaaatgccgcctgtatagcgaagtcccaaagccagcagaatatagctccagatgctgaaaatgtcgaacgcgcttaaaaagaccgcgacgccgtctccggccggtatgacactcgccaaagatgtaacggcgtacaatgagcccgcaccggtaaaataagtgacaagaccgttaataactaagccgatattggtaataaacgccgtaaacaggctgagtgagagcatttttttgtaagttgtcacgccgcctgacattttgacgcacagccagtaaatgagcggaacgataaacagagcgataatgcccccgaagattcctccgaacatcgtgccgaatttagcgaaggttttggtcatttcaatctgatcatccgtcaaaccgtcaagagatgagctgttcagcacttcttcataattcatccccagtccgcgcaaaatactgccggccgcgatgagaatgatgacaatcaggagaggtatgccgatgaccggcttttcttttaatcttttaaactgcacaacaggacttgtaatgacgccgaaaattgacggcttttccgtgactgccgcattgcttttttccaggtttggttccatatagctgatgcctcctatgtattattctgtttatacgtacgctttaggctgagagaagtttcaatttttttgccgtttgcgtatttatgctaaattgtaacacaaattctcagctttacgttccataattatgtaaaaaaaagcatcgtcagaccggtatgacgggtaactcaaaaccttgtaaaggcactgttatcagcctattcatgcagtgaaaaccgcctcaattgcaaaaccctttaaatcccatttagatattctctgaaattcagcgcctataaacaaaaaagccggatggcaatgatgcacatccggctcttttttcaccctccgcttacaggagggataaaggcaatggtatcaccttctgttacggtgctgttgtcttttacatatgtttcattgattgcgatcatggcattgtcaatcgtctgaaggccgtaccgttcctttaacagcgtttttacagcagacgctgccgtctctttttcgtcaagttcaatgaccggtgttcccgcctgctccgcaagcccggcaaataataatactttaatcatcgcgattcccctttatccaaatccggttttccgttcggatagggcgttgtttccagctgatcgcctatccattcttccccgtcttcccagatttcttttttccatatcggcacaatctgttttatccgttcaattgcatattcattcgcctcatatgccgcctttctgtgcggagaagacacagcgattacgaccgctgcttcaccgatatcaaggacgccgacacggtgagtgattgcagcttcggctccttcccatttcgcgctgatttcactgccgatttgagaaagcatttgaacagccatcggttcatacgcttcatattcgagacgcaccgtccgccgtcctgcagtccactctctgaccgtgccgataaacgttgtgatggccccggcttcacgcttttcaactttttttacgatattttccgcaatgataggttcccttgtaatttgaaaacgttccatttaagcagtttcccctttcagctgcgaaagcacaaacataatggcagcaggatcgtccgcatggaatacgggcttgcccgcatctgccggcatatgctccgtatttctgctgacaaccgcgatcacgcgctccaaatgcttcagcttttgccaatcttcgctgtttttgatcataatgattttcggatgcggcgcatgtttaaatccctctatgagaagaccgtcaattcccagacattcatacagactgatcaaacccgccagatcccatttttttcgcgccgtaagctgcaggacgccgtccccttctactgccgtaaccgcggctccggcttttgaaaaacgctccgagtcttttccgtcagaaaaaggttccggttctccgccatgtccgtgatgttttaaacatccaatatcgcactctttcggcgcagctttcagcacacgttcaataaacgttgttttaccgctgttttgaaaacctacgatctggacgatcgggaaagaattgaccacggccattcacttccattctcatcacggatgaggagcgcgtgaaccgtccggcccgcttcataccccctcgttcctcccggcagaaggataaacgcgtttgcttcggcaagagatgtgactgagcttgatttgtcgagaccgaccggtgacgccatcatttttccgtccttatgataaacaaatgccctcacaaatctcgtaaacggattcggcttcggaaagtcgtttgttaacacggcttccgcccatccggaatgaggtttttcattcagaagccatgtctgaatcatcggtttgacaaacagggtgaatccgacataacatgcggacggattgcctgaaaggccgaacagcagcatgtcatcggcccgggcgacagttgtcacgctccccgggcgcattgccactttgttaaaaagaacttccgctccgagcttattataaatgtccggaagaaaatcaaaatcgccgactgacacgccgccggtcgtgatcagaaaatcaacttttttcatagcttccttcaccgcagcatagctgtcatcaaaatcatcggaaattttccctaagttcagcggtactgcacccgcttcaatgacctgggcatacaccatggcagcgttgctgttgcggattttccccggctcaagcggatcgctgacatgaagaagctcggttcccgttgcgataatgccgacaaccggctttctgaccacgggaacggaagcatagccgaaggttgctaaaagagcggttacgcccggcgtgattttcgtccctttttttaatagcgagctgccttttttcgcatcttctccttgatatgaaatattatcgcccgcatgaaaagggcgtttcactgacatgtaattcgtgccgttttcagaaaacgtttttgtcagctcaagcatcactacagcatccgcgcctttgggaatctgcgcccccgtcataatgcggaccgcttcataaggcccgagttctttttctgacacggcgccggctccgatatggtcaatgacttcaaaggtgacggcattgtcacgggaagccgtttttgaatcgctcgccctgatggcaaacccgtcatacggagaacggttaaaagccggcacatcatgatccgccttaacatcctccgccaaatagcggtggagactgtcctcaagcgccacccattcggtatcccccttttttttataccggctcacccggcggactgcttcgtccacctgaatcggcgttcttttttcaagcatagcaatacatccccttcctacagtccgatcactctggccagaactgaattcgcttcttttatatcgtttgtaccgtgaatcagagcccgtccgtcctgaaaaataacgattctgaagcgctcgtacgccatgtgcagcaaaaattcatttgcttccactttaccgatctgcttcagacgtttgacaagctcttctttatccagcctctttaaggcttccgatctgatttgaacggtgtctcttccgcacagcacgcttgctttcggcctgttttcaggctgcagatacggatatacgggctccgcgccgcaggaagggcaatgatcccgtttgatctgatccacatttatgctcatattggtgttattccacacgtcaaacgtgaaaaagcgccgatttaccgccgcatgatttcctgtcagcaatttcagcgcctcagcctgctgataggcggagacgatatgaaccgccggaggtatgatgcctgctgtatcacatgtcgctccgcccacgggcatttgctcaaacaggcaggataaacacggcgtaacccccggaataatcgtcatgcacattccctgactgctgacacaggcaccgtaaatccaaggtgttttcgttttcagcgccagatcattgatgaccattctcgtttcaaaattatctgtcgcatccacaatgcaatccgcttgttcgatcagcggttcgagcgtttccgccgtaccttccgccgcgtaagcatcgatatgtatattactgtttaccgctaaaagacgcgccttggccgccattgctttcggcaggcgctgtctcgcgtcttcttctgtatacagctgctgtctttgtaaattgctccattccacataatcccggtcaataatcgccatacggcccgctccggctcttgcaaggccctctgccgcggctgttccgagggctccggctccgacaatcaggacactgctgtcagccagcgcctgctgccctttttcccctatcggcttaaatcttgtctgccgtgaatagcgctcttccatctgtgttgtccccttgcatttttatttccatcataccatgtttcttaccgatcagtcctgatttgaagactcgacatgcgccaaaagtctggtgtaatcgtcccgtgtgttgatattagcgaactcctccggcccggcgccgatgtcttcagcctgcacataacagacagacagccgtttcagcgtgtctgtcattttcagtttgttttgtgtcagctgatcaaaaagcacatcctgcacccgtttatggtaaaccgccaagaggggctgctctctgttttcacaaaccggtatgacagcgtccagatttcccgtcagcttcatttcaagcgcagccatcgtttttcttgtcacgagcggcgtgtcacaggatatgaccgtatatgtttcgccttccgtttgtttcattgccgtatatatgccggcaagcgggcccattccccgaaaccgcggctcatcggcaaaaacatgccgctccctgtttgataagaacttttttatatgctcagggcggctgataattaccgtttctccgccgccgaaggcttttttcgcctgttcataaaacatgccgcccttccactttgcaaaagctttcggttctccgaatcttcgggaagctccccccgctaatattacattcacccgtttcatgtcatcgctctcccattctatataaaagcatagcaaacgcctcagccgaaatacaatattacggtgcttgtctgtttaattaagaggaatagccgttgttcctttcccatattgtagtgttaacatcaagagggagatggttcttatgaaaatatcaggtccgtttttccacgacacttctcaagagaacctttacttgaaatccgaactttccagatgcagaaaaataatttcggaatttgaagcaagctacttccatcaaaaaaacaataagcttcaggaggaaaacgccaatattaaagagcggcttcacaagctttctgacgaattggaagccatggcgcaaaaacacaaacagactagtgacacggaacgttctttgcatgaaatcagggccgggctgctcgataaaatcgtcattctgcaagaactgcttcagcaggaaacgtttcggcggaaaaatgagatggaagaaaaacatcggctgcatcttacaaatgtaaaatttgaagaagaaaataaaaacttacatacccgcatccgctcacttgagaccgccgttcaaaccgaacggacttctcacgaagatatgaaacagcgttatcatgccgctgcagacgaaaatacccggctccaaacacaaatgatagaaaaagaataccagctcaaacatattaaaatagaaattaatcatatgagagatcgaatactagaaacaaaagaacggcttgtagaaatagaaaaaacgaaagaaaagttatttcaagaaaccattctttcatataaacggcagcttgacgaaagcgatgcttggattgccggccattttgctgatattgacagccgcacggcggaaccggcggaacaaactctggaaatcccttccgtttccaaagagactgttcaggcagaagacttgcttacagccgttaccgaacaagtcatctcccttcaaaaacaatttgtagaatcagagtcccgcgatcagtcgtttgatgaaaaactggatgcgttgaaagaacgagctgacggcgaaaagcctttccaaaaatatgttgtcaagcttgaaaaaaagcctggaaaagatgcgtcacttccgcagaataaacgggaaaacgcaaaaaaactgcttgagtaacgcaagcagtttttactgttttattcagcagccgtatcatttgccgtttctgctgtttcctgagaaatttctccctcaagaatatattggccgcgatatggttttttcacttccggatacattttaattaagctttgcataaatgttgtcatattaggaatttcaaggccgctttccttttcaatttccttttgcagttcggaacttttgatcgctgcattgtggcgtttcaatgttttaatcgctgcttcgcgcagttttgccgcttttgatcccggtctcgccgtccctcttcttcttcttgtagaaccgtctggaatgccggcgggaagagacgtaatagactgcatctgcggctgggaggattgcggctgtgtctgcggcttttgatagcttctcatttcctgtgctgcaagctctgcaagcaccgggagagagtcactttttttctccggacgaaactctttttttgtatcggacaggctgcccgtattgtctaattctctcagttttgcatatattttatcacgttctatttgatattcacgaatgacttttacctctgcttcgttcaattgttctaaacgtaagcgcagcgcttctctttcattaaacatgtgtaaaaccccctgtcaaaaatttaaacgcttttattaagatattagattacaaaagtaattttatcaactattattttatcattttactattttatttactctatgaaaaattgcttattttctgaaaatggtactttatatacaaaaatcccttatcatataggggattctggacaaagttccaatttattgaaccatttcaaaatataacttgaaattacttgtttaatgaaaattagcgtgatatctacaattttcgactataatatgtaaaagttaatgatatggataaaacaagcggtacagcgtgtttacggctgtttctcttattttttaagccatacatgccatattggaattttttatccaatagccacaaaaaaaccctgttacctaacggcaaagggtttgcagaaccgagacaatagtccggcggagattgtcccgattactcagaagcctgctccgtttctgaaagtacccggctgatgcgtttttcaagcattttcatcccgctctctcccgcttgaaaatggcggagctgtccgcttttatcaaaaacgtaataagccggcacatattcattttcaaatgcgtcagccagcgtatgatcgctgtcaacgtaaatcggctgagagatatcgtgttcagccgctgttttcttgattttctcaagatcaagatcgtcttcggaacggggcatgtggacggccaccacattcagctgatctttatatttatcacgaaacccgttcacctcaggcatcgcttctttacacatgcggcagctggcggaccagaagtgaatcagtgccggctttccgccgaccagctgttccttcgtaacttctctgttaatccatgctttagcgcctgttaattcaggcatttgctgatgtaatttcatcttatttccctccttatgaaaaaagttttttgccggggctttcagtccgcctggcaacgttctcctgttttccctccaaaggaaatgatttggctgaatcaccatgttaaaatgagtgtggcgattccttagttcatatcttcacaaaaatgaagatattgaaaccgggcaatatgaacaaatcataaatgtaataactggtttctatgaaaaggtttatcttatttaaaaaacgggtatatcacttttagctttttcctcaatagacttgaaaggaagacatcactatgattgatttaaaacactttgattgggccgggcttctcacatctgccgggattttcatcataaagctggctctcattattttagcgtattttattttccggacggcaggaaaaaagctgatcaagcatctgtttcagaaattcgagcaacaaaacaacctctccacaggccgcgcttatactttgcgaagcctcgcgcttaatgtgtatggatacatcctgattttcgtttttatcgtaatgattttggatttatttcactacaatccgagcgctctcattgccggcgccggcgtggtcggtctcgccgtcggcttcggggctcaggggcttgtcagtgacatcgtcaccggattttttatccttttggaaaaacagatcgacgtcggtgattatattacggttgccggctacagcggcattgtcgagcaggtcggtctccgtacgacgcaaatccgtagctttgacggcacgcttcactatctccccaaccggggcattacgaatgtgagcaaccattcccgcggaacgatgcaggcgcttgtcgatattaaagtgccgcttgaaaaaaatcttgatgaaaccattcaaatcctgcaaaccgcgtgtgacaaagcagccgctgagctcccgcagattaaggaagggccggacgtcatcggggttcaggatttaagcacgtcagaaatggtgatcagaatcattgccaaaacagaaaatatggagcaatggcgggttgaacgcgtactgcggagagaaatgaaaatcgcgctcgaccgttttaaaaacgccgcttccgccgaatagaaaaaccgaagcgtaagcttcggttttttctttttaatgaaattttttttccacttcgctgcagatttcgtcggcggtcattccggaagccgtaatgacgggagcctgagttgacgtatcggcaatgccttggacattgctgtcaagtccggttacgacacagcagtcacaattcttcgcatcctcaggagtcttcatcatcactacgtcatatcctttttgttttaacgcctgttctacatccgataaagattgttcaattccaatttttttcgtcatattgaacacctccgttatgtagaatgctcaatttttgttagattattcttcttttcggatttaattggcatacttcgaaaaatatccgaccatgacatttaccgcggtttccatcgcatcttcatccgggttcagcttggcgtgatgaagcccgtgggatgaatcggcccccagccagaacataaagccgggatattttttcagcatatatccgaaatcttctccggtcatcgcttctttcgccgttttcacgtcagcaagctgatgatcgctgacaaattgcataaattcttcggtcaggccgcttgtattataaacttgatgataaacggacggatacgtgacttttcctttgcatcggaagccgatttcaattcctttgacaagctcttcaatccgctttttcaccatacgcattgattcctcggaaagcgtccggatggttccctccagatgagcatgctctgcgatgatattttgcgccgtgcccccggtaatcgttccgacagttatcacagcgctgtcaagcggatccgtatttctggatatgaccgtttgcagctgcgtgacaagcgtgctcgcggcaacgaccatgtcatctgctgtatgcggatatgccgcatgtccgcctttcccctcaagatcgatgacgagctcgctcgtattggcaaacagcaatccgcttttggtggaaatggtgccgaccggcagctctggtgctatatgtagggcggtgattaaatccggcgtccattttttcagcacatcgctttcaagcatcggtgccgctccgcccggtccttcttcagccggctggaataaaaagagcagatcatgtttgacggggtgatggacaaaatgatcaataatgccgagcgcgatggtcatgtgcatatcgtgtccgcatgcgtgcataaaaccggggtgctcagatgcaaacggaagccccgtctgctcttcaatcgacagagcgtctatatccgctctgtaggcgagcattttttccggagccgtgcccttgattttgacaaagatgccggttctccaagtttcgatttcaattctttcttccggatattggtttaaaagattcagcaggtactgctgggttttatattcctgaaagccgatctccggaatgcggtgcagatctcttcggatggcaatgagccgctctttttccatatgtattcctccttgagataagaataaggcgtggattttatcatccacgcccattctatcaaaccattccttacagctggcgtaattcctgtttgatttctgttttgccttttgttttttcatcgatatctttgatttttttcgctggtgttcccgctacaacggtatatggctcgacgtcatttacaacaatggctccggcggcgacaaccgcgcctttaccgattgttacgccttcaagcacaaccgcatttgcgccgatcacaacgtcgtcttctacgacaacaggcttagcgctaggcggctcaataacgcccgctaatacagaacccgctccgatgtggcagtttttgccgacagtggcgcgtcctccgagaacaacgttcatatcaatcatcgtaccttcgccgatgactgaaccgatattaatagatgcacccatcatgataacggcattgtcgccgatctcgacttggtcgcggataatagcgcctggctcgattctcgctttcacatcttttaaatcaagcatcgggatcgcagagttgcggcggtcattctcaatgacgtaatcctcaattttgtctttgttttcttcgattgcgcttttaatttcagcccactcgccaaaaacgacgccggattggccattcaggaatgttttagcggaatcgccaaagctgattccttcgagatcgccttttacatacacttttacaggcgttgattttgtactattttgaataaatgaaataatttcatttgcatccatcattttcatatgtattgtcctcctctgattttctacctcattactgtaacaaaggaaggatacaaagacaagaaaaaaaggaacaagcctttattctgccggctggctgcacagcgcggcaaactgtcttccgaattcccggagctcttcttcctcactgccctcagggttgttttcaattttgaccggcggcagcaccacccgtccgccgcgggccgtgattactttttccaattcgtcaaccgctccgcaaaaaaactcataggacgtatctccggaaccgaacaaagcaaatgtttttcccgtaaactccagtttttccatatcttcagcaatatcgagcatttcatcaggaagatccccgtctccccacgtatatgtgcctaataaaatatactcgtaatcattaaaaagtccggcatgaatatccatcgcttcatatctgtctacggatgcttgtgcttcgatcagccctttttcaattaaatccgccatcgcctcggtgtttcctgacattgtagcgtaaacaagcaatacattccccatcttcgtctctcctttatgcataaaaactaatgtgcgagccgaaccgcctcatacggtctgacaaacttactttcgtaaaggcccgcgcaaaaaaaatcttcttcccggttggccacccgccatccgtgaccgcggatcgtatcaaaccactttaattcaccggcagcgagatcagcttgataaatacgcgaaaatccgctttcgtcctgtgacgaagtgacataaataatcccgttatcctcagacacgtcaagaaatgatttttcccgtacattgtccccggctgtaatggcaaactcctcatgcgtccgcacgtttcggacagcaagctccccccgttctccctttgccgcgccctttgctgcaatgagccagtcattctgatacatcatcattgaagccgtcatgcgctgcctttcgcggcttatacgccggatgcggccttccgtcgtcagatcatacgcccaaatgccgccatgattcatatgaatccgggtgccgatataaaccgtctgaccgtgtaaacaaagcgaacggatgacaggcggctcctttaattgtgaaaaaggcttagccacatgccaagtgacgccgaaatcatcagataagtagatgcagtatgtgccgtgcgcacagacaaatccgtcattccgcccggcaacggcccatacggaggcgctggtcggaaatcgggaggccgtccaagtctttccttgatcggccgatctgaggacggcgcctttttctccagccgcgaatatgtagggccctatataagtcagcacatgaatcctgctcttcactcggaatagtcttttccagccttcttccgccgaaaaatgaaaaataccttcgcctttcacagcgacaaaaaatcctgaagatactgatgccatgacagccgtcgcgcctttatgaaacatggcaccggtctccgtggtgagcggcccatgcaagaaaaccgcggacaaattctttgcagcattcttgatcttcagccgtctcgggcgccagctcaattttcagcgtttccggatataaattggctccggcctgttcaaacgcatcgcaaaacagcgtgaccgcttcgcaaaacttcgggtaggcgtgatcgcctgaaccgaaacaggccgttttcagtccgttgagctggctgtgcagaatatcttcgtaaaaatcttccgcttcgtaaggaagatcaccatccccccatgtgtatgtgccgacaaaaacataatcatatgctttgagagaatccgcatctgcttcgtccatatcaagacagtcaaccgctatctgatgcccgctcagtgtttcttttataatgccggcaatatcctctgtattccccgacatgcttgcgtatatcattaatgctttctgcatatgatcacctcgtaattgataatgattttcattaacatacataacactttaaatgataatgattttcattgtcaataaaaaataaaaaaaagacagcatgattgctgtctttctaaaatgggcgttcctgtttcagcatatctttaatgacagaaacaaaagcctgcacctgttttaattcaaatgccggctcataaccgagcagccatgtgtcacggccgatcggatggtcctttgtatcaagcaggggcattttatttactttatcttcctcttctaaggtgactgacggcagaatggcataaccgatcccgtgcagcgccatttgcttgcacgtttcaatctgatcgacaaggatggtctgtttcggcgaggttttgaatttttgatgccaccaatgctgaatttcctgaaaatatgtactgtcacttttgaattgaataaacggccggtcggtatgggcaatatcatcaatacaggaaatttccgtatcgaccaaatataaatgatcggtcattaaataatctttccggcctttccattccggatttccccggataatgccgatatgtacctgatcttcatacagacttttcagcatttcgctgctccagcctgtaatgagagagacctttgcattcggatatcgttccacatatgtttttaacactttcggaagccagtgctgcccgataatggaggcgacggcaagctttaatgtgccgtgaatctcaccctcaagttcatcaatgttttctctgattctttcttgccgatccgtgacgtcatttgcaaattgtatgattttttctcctgccggcgttaccgtaagtcctttttgagacctaagaaagatctttgttccccaggttttttcaatggtctgcaatcgctgggacagagccggctgtgacacgaataaccgttcggcagccttcctcatgtttaattcctcagctaaaactacgagcatatgaagctcttgaagctgcatgtcgtcctccttttcaatgccttttcgtattccttatctaccattctaatcaaataaaggctgccgaggcaagcgccactcgtatgtatgcgttttctttttctggcatgcgaaagaacaaataggctgatcgtgcgagcctacttattcaatgatctgatatgactgctcaactgctttaatacgactcttctcgtgaaaatgccttcaaagacgccttcatcattttcaacgcagacaaagccgttgttaatgaccatgctgaaccctttgataatcggatcattgatgtggagacggggaatgtctttcagcatgacttcctcaaccgtaatttgatccagcttctcaaactcgatccgttcaagtccgaaaatgctgttcataatcatatttgtcccgatcaaaccgtgcagacggtacgaagcgtcaaggacgggaatggcggtatagccggttttcgtcagcactaatagagcatgctcaaggttgtttccgacttgaacgtgcgccactttatccgcctcgatcataaattgtccgactgttgcatcaagaagctgatctgattgtaagctaatcatgtcacttcgacccctttacatttttcatcaaagcatgtattccctatattgcaataatataaacattatcattttttgtcgaaaagtttccgtcaataaaaaagatactctttgcaatcgagtatcaatttataggccgctgattaattttcgttccgaaaacggtcatagagcgttacgagttttttataagtggtcccatcaacgctttttgaccctgcttctatatcgttgatttcgctggtcaaaagctcaatggcatattcttgattgatcaggatattcagcagaagtttctgttcttcttccgtaaatcgttcactgataagactcatacgtaatcaggccccctatttttaactgaatacctctgaaagcaatgtgaaatttgctttcagctctaccgctagaataagtaaacagaaaaaaatcgtcaaccgcataattcgacattttgcggattctgtatgaaatattattttgtgtaacgattggcataactgaatgctgtgcaggaatcgggcttgattttcgcttcaatacccatcgaggtaatgcggccggtcatttcttgtatcaattcttttgtcagccctttttgaccgatatccagatgcacttcaaatgaaagatccgccccttcatccgcaaaaggcaagagcaaatctgtcagttccataagacagccgtcgaggatatgcgcagccatctcctggctgaacgcggtttccagcgagattttttcgcgaaggctatgtatcggtcttgcaaggtcgtgatttttcaaacagccccaagctcccttgcctgtacggtgcaagtgtatagccgtaataaactttgtgaagtcgcggtaaacttgtgaatcagtccctacagacagcacgtatgctgaacgggggtctttattgacaaagcgtttcagccgctccgtcacgtcttgaaaggtcatctgtgcctcagaaagattataaaacagaaaagaatcagccatgtacggacactcctctttccagagtctacaaccaaacgaacaagcacgttcctttgcataatttaataaagctccgcttgcggaagaccggaagcttggtcagcctgaaaaatcaaatcacattactgaaggagctcaaaaatttcaatagaaatcatgtcaatgttatcaaacggatatgtgttaggtttttcacctttttggaaaaccgtcagttcaaacgtttgatttttttcgaaatatttaacactgcaaattttttcgccgttaacttcaaaataacgctgcatcggctcgttagccgcttccgctgtttcttgcagactttgcagccgcgtgatgatacccattaattgtgacattctaaaaaaagactcctttcaaaaaacaacttcaaatcaacaagtatttattataatacaagtcctacagagcatcataccataaagtagaccgggatggcattttcccgctggattttcaaaaagaaataaacgggaaaaccgtgttttcgaatagtttgaagcttttttcggaatgtcatacacctttcaaaaataatttttcgctttttgagccgccattgtcagatgtatgtaaggagaagcccttttatgcgcagacagcataaaaaaacttggcggggtagcgccaagctttttcggatcttgatctgatagaggggttggggaacagagagtaacttctctctataactaaatgataatgattatcactatcattgtcaatcgttttttaaaactttttcacatttataaaaaaagcggcatactgcagccgctttaaagtaacccgtcctgttcatataaataagagtaaggcagatcgataaataaatacatattgtcatccatcgggtatgaaaaggttctgatcatctcacccgtctcaatatcactgtacaggtcactgaaaaagccttttcttgaattccgcatcttcataatgttttctaaaaagtacggacgccagctccagtttttctccacgtattcaggctgataaagccattcgccggactgcttgaacacatttcccgtcagctgatagccttcttcatcacacatataaattctgaaacagcagtcggtcaggttttccgccagttttttaataaactcatcgtccgcctgatgggttttcttcagttcggaaactgcctgattgacccgcttataaaaattctcagagtgttcgtatactgtctccagcttctttttttctctcgtgataaattgctgaaactccgttttcaagcgtgcttttaacaggctccggtctataaaatcgccgctcggcgcctgcagataataaccttgaaaaaatcggcctccgtttctccatgcgtactggagctgaaaatcagcttctatatcttcatacagcagcgcggcgccgatttttctcgccagcaatgaaatgctgtacagcacatgctcatacgaaggtgacggctgagatactttcagcgcctgcaaatctattttcagaaggtccggtgaaaggagcgcgattctgtccaggttgctgctctccttacctatattgtccaccgcgattttaatgccgtatgtacgatagtaggcaagcatatggtacagctgttcaatgtcgccttcgaaattgtgctcggtgatctcaagcacaatacggttcaattcaatgccctgctcttcgtattctttcaaaagctcaagaaagctctcgccgtggtcaagcatcaatacattcgcatcctgattgataaaaatcaacagatcgcgatcagcttctttaaaccgctccagcgcctgcctgatgactctgtcatcgacctcaagcttatattcttccgggatgccggaatctaagaaaaacggcccgaggctctcaatctccgcatctgccaaaatacggccaagcacttcgtagcctacgactctttgttcctcagcgttaaaaatcgcttggtaatacggaataacatcatcaatattcgtcagtatatcaagtgggtccaacatgttatcacctgcttctctatctttgtctgattatacacaattatatcagcaccacaaatgtttagattaggggaaaaaggaggcagtatggcagcagtttaaaataaaaggggaaaactttttaagatcactcttcagaccggttaattaaggacgttattcatttgtttcaccatcacaaataaaaggataaatataagagcatgataaccggcggctgtccaaaaataatggctccaatcagtactgttaaatatccaatcatcatcatgtttcaactgaaagaaagttccttttttatctaaagtgccaaatgtaagagttgttaacccgccagcactcttggaaacgtcaacttcatacattgaaccggcatgatcagtatgatttattggcatatacgtataatcagataaaattgtttccgccagcttggttggcagagacacatatcatacagccgatgtatcgcctccgagcccactcaaatactccctggctttaataaatttcgtttcatcaggaaaatctatatgatatagcttttcaaatctgattatttcatcagatgtaagattggtattttgataatactccggagtaaaagcgcaaatgataaagtaccaaatattaaagatgataacgaaactgcttacaaatagtacaacgaaccattttaataatttcttcacttattcacctcttaatctttaaaaattatatcataattttgaatagaaaaataaaacaagcgaacggtcacctttaacgttcgcttgttttgcaaaatatgtcatgtaaattaaaacgggtaaggattcagccattgccccccgtccattgtgatacaatccccgtttatataggatgcttcatcggatagcaaaaacgctgccaaagcggcgatttcctccggtgtccccagacggccgagcggcacactgttcatagtgcgggacaccgctttttccgattcaaacagcttctccgcaccgcctgtccgttcaatcgggccgggggctatcgcgtttgtgcggatgccgtatttgctcccccattcaacggccagcgttcttgtcagtgacaatacccccgctttggctgcagcggaatgaacgacacccgctcccgctccccatgcgtatgtagcggccatatttaagatgacgcccttctgctcctgctcgatccaatgccttgccgcggcttggctgcagaaaaatgtgccgtttaaaacaatctcaataacagctttccatccattgggcgtcagcttctctgccgggcaaataaaattgccggccgcattgttaatcagcgcatcgagccggccaaagacttttttcgcttctgtaatcatgtctgaagcggcggaatcagaacggacatccatttgaaaacaggcgacctgcccctcaaaggtctcaatttctttttttgtttcctcaagtgcttcatggttcctccctgtcaccatgacgtgccatcctaattcagcctgttttttcgccattgcttttcccatgccgcttgaaccgcctgtaatgattaccgctttcttatccataacaaacccaccccttttattgaatgaataatcattcataattttatcatagatgtctttccgcgtcattacatgctgagaagggatttttcagccaggctgatgatataatagaacaactctgacaaaggttggttttacatatggagaaaatgacgagaagaacatttttaaaaagaggattcggcattttgggtgcaactctcgcaacggcttgcggaggttacggctatgcccggtatattgaaccgcgcatgattgagatcacccgtcatacaatcaccagccgcctgatcccccgcggctttgacaattttaaaatcgttcaattcagcgatacgcatctcagtgatgtgtttacatccggtgacttgaataaagcagcggaaaagatcaatcagctgaaacccgatctgctcatctttacgggagatttaattgataagccgcatttatttaatgatcaccagcaagcactggccgtgctgcaaaatctggaagctcccttcggcaaactttgtgtttacggaaaccatgaccacggaggctacggtacgaacacgtacaaggctctgatggaagcggctgattttcaagtgcttcgaaatggctgccgtcaggtgcagctgacagacggaagccggattgaactcgcgtttttggatgatgtaatgctcggaaaacccgattatgaaggcaccctttcccgcctttccgaagatgcgttttccattttaatcgtccacgagcctgatgccgctctcaagatcggcggatatcccgtaaacctccagctgtcgggacacactcacggcggccaggtccagctcccgtttttcggccctctcattacgcctccatacggaaaaacgtataccgacggcatgtatacgctgcatgacacagccgtttacgtcaatcgcgggctcggtacgacaagactgccgtatcgatttttagccagaccggaaatcacgctgttcacattgaaaaccgtacaaaaataagacttttatcccgatgcacagacatcccctccgtaatatgtatatggaaaagagcaaaaaggagggtgacgaaactgctgacatatcaagtgaaacaaggagaaaccatctcaagcattgcgcaagacttcagaataagcactgctgctctccttcaggcaaatccctcaatccaatcggtcatatacgcgggacagcacattatcataccgaatcttcccgacccatccaccattccctattccattgtcgtgtatatcggagcgaagaaactggagttataccgcctcggcaggctcatccgtacgtaccccatcgcagtcggaaaaatattgacgaccacgccgaccggagaattttacattgtgaaccgccagcccaagcccggcggcccgttcggcgcttattggctcagcctctctaaaattcattacggcattcacggaacaaataacccttcctccatcggcaaagcggtatcaaaaggatgcatccggatgtataatcaggacgtcactgaacttgccgctaccgttcctaatggaacaagggtgaccattataagatagaaagatcttatttgttaatggaacgagctgatgataatatattacagtgggacctttagggtaaggagcgtgtttatggatatatttaaaaatcgcaattttgtccgtctctttttcgcagcactcgcttctcaaatgggaacgactgtaggtaatatggctttcgctttttacttgctggaccatttttcaaaccagccggcatacacaactttggctgagctgatgtattcactgccgacagttttcgtatttctgattgtcggtgtcgcagctgaccggcttgacaggaaaaaggtcgcagagaattgtgattggatcagagccggactgacgatcgtattatttgccgcattatacaccgggagcatccctctcgtgttctgtattttgttcatcagaagcgccgtgaccaagttctttttcccggcggaagccagccttgtacaagctattctgcctaaggagcattatgcgaaagcggcgggacttaaccagatcctgttcagcatctttatggtattcggcgtcggtatgggcgcgtttatgtataaaacgatcggtattcacggagccattatccttgattttgtcagctttattgtatcaggctttctgatccgcgcctgccgcattccgaaagaagcccgtcagccgaacggcccttttaaatggggagattcgtttctgaaagactcggtcgctgattttaaggaagggatcgtatatattgttaaaaacaaattgcttgcttcccttattttcggcttttttatctttggttttgtcaacggcggctttgccgtactgccgatgtttacgatgaaatacggacttgcgcctgatcattacgaatcacatacttccatcttcaccgtcgcactcggcttcggcctgcttgcaggaagtgtgatcggaacaatgatcgcaaaaaaagtcaaaccgcatcatttgatgtcgattcctattttggcagccggactgctcatttttgtcctcggctatacggataagctgtggatttattatgcggcggctttcatcctcggcatgtgcatcggccctgtcaatatcgccatcggcggctggatgccgaaaatcgttcatccgaaaataatgggccgggtcagcggctggcaggatccttttatgatgtttgcccaatcgattacactcggactggttgccctgttatttccgaaattcgtttccaatattgattacctttattacggcatgggaatcgtgattttagcggtatttgtgttctattttatcgctcttccgaaatacagcgccgaggcagcagaggtcgatgtgcagcaatcattaaaggctgattccgaaaaacatgcgaaacctgtctaataaaggaaaaaaatgcgcccttttcatcagaaaaaggcgtatttttataatcaatatttgcatttcaacgctaaaaaagtataatctatatatgaacttgatcaatgcaaaggagagaaataatggacgaccacgcttattcgaaagagctgcagccaaccatcgagaatctttcaaaagctgtttatactgtgaaccgccatgcaaaaaccgcccccaaccctaaatacctttatctgctgaaaaaacgggcattacaaaagcttgtgaaagaaggcaaagggaaaaaaatagggcttcacttttcaaataatcccaggtttagccaacagcagtcagacgtacttatctctatcggagactactattttcacatgcctccaacaaaagaagacttccagcatcttccgcatttaggtacgttaaatcaatcgtaccgcaatcctaaagcacaaatgtctttgacaaaagcgaaaaacgtattgcaaaaatatgtgggcttaaaggaaaaaccgcttgccgccaacaggcagcagcccgcttatcataaacccgtatttaaaaaacttggtgagagttatttttaattccgccgcaaaaaagccgatgcgtcatgcatcggcttttttctattcaatcacgtacgtatccacttttttaatgagctcgctgatttcaggcttgctgatctgttcatccgctccgactacttcgccccggtggcgcaggtcgtccgtaatgagggacgagaaaatcataatcggcacatcagagctttgcgggttatccttaaggagcttcgtcaaacgatgcccgtccattttcggcatctcaatgtcactgataatcatgtcaatatgatctgacaggtttgctccgttatccgtcagttccacgacgtaatcatacgcttcttttccgttttcaaatgtaacgatttcactgtaccccgcctcagtcagctcatccgtcaaaagacgcatcagaagcggcgaatcttcaacgatgatcagttttttacccgcccgtctttcatcaaatccttcctgatggacatgataagtctcaactccggatgccgattcaatatcgtaaatgatcttttcataatcaggcagaaagatcatcgtgtcttccagtttgatgattcccgttaaatgccgctccatgccctggttcagggaagtcggcttttcaatcgcctcccaggacaccctgtggatttgtgaaacggaaccgacgtgaaagacgattttccgcttgttgaattccgttacgatatatttatcgtcttttgctccttcggcatcaacgccgaaaaaggaatacagactgatgacgggaagaatttcgcctctcagcttaatcatcccttctacgtctttatgagactgaggcacagatgtgacatctaccggctgaatgatttcccggactttcatcacatttatgccaaatgtattgacgcctacttcaaatttgacgatttctaattcgtttgtgcctgaatccaataaaatatcgtattgttgtaaagacaattcaatccctcgctatccgcattcagtattgtactgtatatatcggctgtaaacggaaaaagtgaatgtattcgggccaactggccatgaactctttataaaaagatgcttttttctgatatcccattgactttttgacatcgagtggtaaaatagtcaaggatttttcaggaagaagggtgtaataaatgggtacagtagtcatattcgaccaagatcaaatgacggtgttagaagatatcagcaaaacggcttacctgcaaatgaaaaaagaggcgaaagagcgtcccgacaagcccgctccatacatcttatggcgggaagacgtcagctttgaatacgggtattaatgacattcgccacatatcacaatagatagatcatgatacaatgaagacaatcatttcagctggttgtcttatttttttctgaaaaaaggtatgttttcacatatcggacatatactcgggatagttcaataaaaagatgacaaatgctcagctagtggtaaaataggataaactcaatatatagtataaggtgatgaattatggaacatttgcttaatccgaatgtaaaagaaattgaaatttcaggaattcgcaaattctcaaatcttgtagctcagcacgataatgtcatttcgcttacgatcggccagccggatttcttcacgccgcaccatgtcaaagcggctgccaaaaaggcaatcgacgagaacgcaacggcatatactccgaacgcgggcggccttgagctgagacaggccgtacagctttatatgaagaaaaaagctgatttgaattatgaggctgaaactgaaatcattgtcacaaccggagcgagccaagcgattgacgcgtctttgcggacgattttatctccaggcgatgaagttattctccccggaccgatatatccgggctacgaaccgatcatccgcatgtcgggcgccgttccggttcatgtggatacgacgacacacggatttaagctgacggcgcggcttattgaagaatcgctgacaccaaaaacaaaatgcgtcattcttccttatccgtcaaatccgaccggtgtgacattgtctgaggaagagctgcaaaacatcgcagccgtcctgaagggcagaaatgtttttgtcctgtctgatgagatttacagcgaattaacctatgacagaccgcattattcgatcgcgtcttatttgagagaccagacgatcgtcatcaacggcctgtcaaaatcacacagcatgacgggctggagaatcggtttcattttcgcaccgaaagaaattgccaagcacatcttaaaagttcaccaatacagtgtgacatgcgcgtcttcaatctctcagaaagcggctcttgaagcggtgacaaacggtgttgatgatgcgcttattatgagagaacagtataaaaagcggcttgactatgtatatgaccgtcttgtttcaatggggcttgacgtcgtaaagccgtcaggcgcattttatatcttcccttccattaagtcattcggaatgtcatcgtttgattttagtatggctcttttagaggatgcaggtgtggctcttgtgcccggcagctcgttttcaaagttgggtgaagggtatgtgaggctgtcattcgcatattcactggatacattgagagaaggcttggaccggctggaagcatttattttaaaaacgagagaatccatgcagactatttaaacaacggcataacgccgttgttttttttattgtttcgggaatgtaatgtgaaaggccgtgcctctgtccggtttgctgtctacttggatggctccctggtggtttttaataaggttgaatgtgaccatcagccccaggccggttcctttttctttcgttgtcaaaaacggttcgcctattcgtttcagcacgttttccggtatcccgtcgccctcgtctttcaccgtcacattaacggaatactcatcttctgtcatgatgatgtgaaccgttcccccatccggcatcgactcaacggcatttttaatcagattgataaacacctgtttcagctgattttgatcaccgttaatatacatgctgtcatgttcgtaatccgttttgataaaaatccctttaagattcgcctgcgtctctaaaagagcggtcacttcacttataattttctttaagtttacacgctctttcacggcgttttgctgaggtttggcaagcattaaaagctcacttaaaattaattcgattctgctcagttcggaaaacacaatttcaaagtaatgttcgttttcctccatcgtcggcttcatgagctgtaaaaatcctttgatcgccgtcagcggattgcggatttcgtgagcgatccccgccgccagctgccctgcgatagacagcttttccgacttcagcattaattcctccgtctgcttccgctcagaaatgtcacgcagaatgacctgcacggccgtttctccgaaaaacgtcgtcggaatgcagaccatttccgtgtagatcagccggtttttaaaggtaaaccacgattgcttaatgatttctgactcggtctttcggttgataatattttggatccgctgtttcacgccgtcatgatcacagggatgaagctgatcatagacgtttttcccgattaaatcttcatatgtttcagcctcaaacagcgaaatgcccgattcattcatgaatacccacttatcattgtgaatcacggcgatcgtgtcaattgaattctgaatgaggagctgataacgctctctgcttttttgcagaatcgtttggaattttttccgtgaagaaatatcaatcagaagcagcaattccgcccgctgatttttatatgtcgtcggtgccgccttcacttctaaatgaacgggcgtgccgtcgagccttctccacgtctgttcgatcattccgacttccattcctttttgcatccgcacaattcggtttttcacaatgtcgtgatactcttcttcaataaactcataggagcgcctgccgattacctcgtctttgctttcggctcccagcatggcaagcatcgcgttgttggcgtaggcgattgtgccgttgatgctgacatataaaggattcggcagcatttcaacaagacgctcgaattcgccgtttccagccgcatcttccgactgttgttctgccttttgcttcttttgttcatacatataaggccggcggggcgtcttctcctcaagcaccttgattttgaggatgatttcccgatccgtcccctccatttgcggtgtgacaatttccacacccgcttcaagccatacgatggtatgatcttttttaataagacgaaaggtgcaaggcatcaaatgatgctcattatagaagtaactttcaaccaaaaattgatcttcttcatgcaggaacgttttgagaaatgacccgatcatctcttcctgagaataactgaagtacgatttacagtttgcggaaatatacataatacgcccgttagacgtcaaaacggcatgaagatcggttttcgattgaaactgtttgacatgctgagtatcctgttccacagaatccctcctttgcattatactcgcactgcaggctggacacggactgatataaaaagaaattccactagattgattcgctaaaaaatgagcattctccttctattcttattgtgaacgtcaattttcctgaatgaaagaaagggcgcacgagatgttcggccgccctttcatttgttattttttattgtatttcttttcaagttctttgtaagcgtcaattgctcccttagcaatgtttttgcttacatgatctttatcatttccaacagacggaacgacgacgctgaatgccactcttggatgctctgacggataatagccgacaaaggtcaggttatacgtgtacttcccccaccagtttttgttcgtgccgtaatagtgcgtctccgcggttcccgtttttccggaaacatcagcgccggaaccttggaatgttgaataagccgttccttgaggtgagcttgtgaccaatttcattcctttatgaacttggtcaaaatcgctcggactgttatttactttgttcaaaattttaatatcccgctgttcaatcgcttttccaatcttatttttgctgtccggttcatgaatgcttgtgacgatccgcggctggacgcgatacccgccgtttgcgatggctgaaatatattgagccatttgaagcggcgtatacgtatcaaactgtccgatcgcaaagtcaagcagcaatcccccgaccatttgcggatttgactgcatgcccgctgattcctgcggaagatcaatcccggtcttcacacccaaaccgaattgggcgtagtagttgcgcatttttttaatatcgtctaatccggcaggcagcgtgccgtacggcctgtaggtaatgccggcgatatgcatggccacatgaaacatatacacgtttgaacttctttgcagcgcggtcagctcagtaatggctcccatttgtgtccacgattgttttctcgttttgcctttaaatacaagcggtgcatcgacaaacgttttataatgcgggaggccgctttggtaacccgcgagaacagtcgctcctttaacagaagagcccatctcatattgggtcgtaaatgctccgatcgcaaaatcctgtgttttatttgtttcgagatcgatgcgtttccccgccattgagagaatatccccgttgttcgggtccatcatgacggcaaatcctctgtcaaccatatagttgcctgcggcgcggcttcttctcagctctttttcaatgactttttcgactttcgactgtaattccatatcgagcgagagttgcagatcgtagcctctgctgccttcatcgacgggcttttggctgacgacctcacctttgctgttttccacatactctactttttctttatgcgcgtttaaatagtcctcatactgatattcgatgtagctttttcccacccggtcattcagtgagtagcctcttgtgacatagtaatctttccgttcgcccaacaatccctgttccggtgtcgtcacaccgccgaacagagagtacagcgttttgtcgtatggatattttcgcgtccagtcattgatcacgtcaatgccggggagctctttcaggtgctcggatacgacggaaacttcttcatatgtcagatcgctttttggtttttgcttgttgttttcatgctcgtcaagcaatgaaccgctgtttccgtttccgttcagcttattcgggtccattgatttgacgacttgcggctgataggcgttgccgcttgaaaaacgcgtataaatcgccgcaatttgcagctcttttttatcttgtttgatcgcatcaatctcctgcttcggaacgcgttcaatctggcgtttgtacacttcttgggatttcaggctgttttctgaatccttcataagcttttccgccttcttcggatgtgccgcaagccagtaatcaatgatatttcgatccttcataaattcagtatcaatatgaatcagtgcggcgagattttttgccgttttcaatttgtcctttgccgaggtttttgaggtagaaacgtatacaatttcaggcacagcctggttatcaaccgccaccctgttccgcttgtcatacatttttccccgcggtgtcggataataggcggtttttgcatttgccttctccgcatcctggcggtgtttatccccttcgacaatctggacgatgccgagtttaaaaatcagtgccgtaaagagaagaaacacaatcaaaaaatagagattcattctcagcgctctgtaacgtttcgtttttttctttggttcgcgcgcgacttcagccactttctgttacacctctcaaatcattgaatatatttacataaacagattttaattgtaacatttttgtaaaagttgttacagcgaaaacgggtaaaaaaaactgtcaagatcaaattatcttaaaatatatctaacacttcaaataatttgaagagatgtaacggattttaaaaaataaatacagatcgtttttactgatataaagccatttttctgtgctcaattacaattatgacaaacgtttgttgtcaaaggaaatggctgcctgcattatgacaaaaaagctgtgataagatttttcatgtagaaaaaaacaacttctctgggaggctataaacttatgaaaaaagcatttctcttatctgccgccgcggcagtcagtttgattacattcggaggcattcagcaggcatctgcaaaagagctgtcatgccagcacgtcgttactgtgaaaaaaggaaacaccgtacagcatctgactcttcaagaggctgttgaaaaactacatatgaaaacgagcgtgaaaaagctgaacgttaaaaatgagaaagaactgactcagctgctgcaaaaacacgcaaagcattctgatatgacagttaaagacgttcaaaaagaaacaccggaaaaaacggccccgacagctgccgaaaaaccgaaagccgatcaaaaccagacggctgacaatgcaaagcagacagataatacaaacaacagcagcgagaaaactccttcatcagtcagtgcgtatgaaaagaaagtcgttgaattgacaaatgcagagagacaaaagcaaggcttaaaacctctgcagattgatgaaaaattaagcaaatcagctcacgcaaaatcacaagatatgaaagacaaaaactatttcgatcaccaaagtccgacttacggctcacctttcgatatgatgaagtctttcggaatcacttataaaactgccggtgaaaatatcgccaaagggcagacgactcctgaagccgtcgttaaagcttggatgaacagtgaaggccacagaaagaacatcatgaatcctgagttcactcaaatcggtgtgggttatgtagaatcaggaaacatctggacacagcaattcatcggaaaataaataaaaaaagattgcccggcgggcaatcttttttttatttcacccaaagcttataaatgctttgagttccgctgttttcttcaccttgcgcggaaagcttgtcgtacaatgatttggccagcgccaatccgggcatttcttctcccatgagctccgcttcttcaagggcaatgcccatgtctttaataaagtgtttcacgtaaaatccgggcgcaaaatcgcctttcagcatacggggagcgaggtttgacaatgaccagctgccagccgctccggttgtaatgcttttcagcacttgttccgggttcagaccggatttttccgcgtaagccatcgcttcagccactccgaccatccccgctgcaatcgcgatctgattgcacattttcgtatgctggccgctgccagccggcccttgatactgaatattttcccccataacggagaaaagcggcaggcatgcttcaaacgcttctttttctcctccggccataatggcaagcgttccgttcctcgcgccgatgtctccgccggaaacgggtgcatccagggcgtgaatggacttttctttggctttctccgctattttcttcgccagagatggttttgatgtcgtcatatcaatgacaaacgccccttcttttgcatgacggagaatgccgctttcaccgagatagatttcctcgacatcactcggatagccgaccatggtaataatgatgtctgctttttccgaaaggtctttgaccgtctcctgccagaccgctcccttattcagaacctcttccgctttgtgtttcgtacgcgtgtagactaaaacaggatagcccgcttctaaaatgtgcgatgccatactgtttcccatgacgcccaaaccgataaatcctaccgttttgttcactgcgctttcctcccctgatgcgattcatatatcactctttcatgtctatattaccatattataggctgatagagaccgcgtcacaaggtgaatttagaaatggcgctgatcagatcttcgcttgcgctctttaacatatcagtcgattgcttcactttttcaagcgtaacgagctgttcatcagtagaagcattcacttcttccgccgctgccgcagattcttgagaaatggcggagatgctttgaatcgcttcttgaatcgaggcttgttcttcactcattttttgaatgtcattgtaaatatgatctataccttgaacgagagactgcatttccgttgtaatcagattgagaacctcacccgtttcatgaatggcgctgttttgttcatcattcattctgcttgcctcaatcatcgcgtgtgacgcttcttttgtctcagattgaatcagacggaccgtctcactgatatggccggaagaaagagctgattgttcagcaagcttgcggacttcttccgcgacgacggcaaagccccgtccgctttctcccgctcttgcggcttctatgctcgcattcagcgccaagagattcgtctggtctgaaatagcggatattgccgtcacgacttcttctatgtttttcgtttgttcttccaggtcattcagcattgcctctacttttttcgtttctgaattggcttcgtttgacttcatcagcagctgcccgagcgcgtccaatcctttgtagctggcatcctctgaagattttgagagttgttttatgctgcctgcgcgatctgcgattccttttattttgactgagagattttctgatttttcgttgatcgtctcaacctctgacgcttgctctgtcgctccggcggcgacttcctctatcgcttttgcgatttgtccgctcgtttcatttgtttcttgtgaaatgacggttagctggtcagatgtatcagacacattttctgaggaggccttgacctgttcgaccatctctttcatattttcaaccatttggttaaagtcttttgttaactcgcctacttcatcttttgatttcgtctgggcgcggacggttaaatctcccgctgagactgaatttgtttttgcgatcagctgctgaatcggcccggttatcgtttttgcgaggaaatagctgagtccgatcgtaatcacaagggcgatcagtgacataaaaatgctcaccgtgttcattttgtcggctactcccatcagctgatctttttcaaactgcgttccgactttccaccctgtttcttttaccgtttggtagacgaccatgttcccctgcagctctttgatgccttctttgtccgcagtgatgtcttttaacgtctgatcttccgaaatattttttccctgttttgccggatgggccagaagagagccgttttcatccgccaaaaacgcaaatcctttatacggaaccttttgctcgttgaccatgctctgaatggaggacagcttcaaatctaagctcgccactccgacgacggttccgctgttttgaatggcttttgacgccgtcacgatcatgtctcccgtcactgcatctttataagggtcagtccagacaaccttatcgggtttttcagccgccatcttataccacgttcgatttgtcagatcatagtctttggcaaaatcggcctttggatatgtaaacatttgtttgtttgcggttccgacgtacgcaagcgcgacatatttgtcattctgtccgatctgttttaactcatcgttaaaaagccgcgcggtttctttcttcccatctgatagaaaagaccgggacaattcaccgtctgctaatctcattaatacggtctcatcatttttcagctgaagctcaatgttctgaccgagtgaattggtgacattctctgtcgtacgttttgcttcctccgtcatcatcggctttaatgtcaaatatgaagaaaccgttaaaaaaacaaccgttacaataagcattgccgatacaaacacagcaattttgatatgcatttttttaaacataaccatcccctcctgagagttatatcggtctttcggccaagaaaatgaataaatcttgaaataaatatcaaacatttccgtcatttgtcgcagcaaaaaaaagagccgtcatgccgacagctccgccttacgtaaaatattcgattttcgctttcggaaaataggtttcgatataagattcgagtgtttcccttaaggcatgttcttcgtctttttggtatatatatttgccgattccgtagcgtccccatttgtacctgcgcttttcttcatcaagctcaagctttgttttcggatagttcttctcaatcacccgtttggccggttttgtaaaacgatgctggatcagttcaaatgtgatgtcatgccgaacgtcttcatcaagcgccgcatccagtttctcaaacagctccttatagccttcctcccagccatcatgaatataaataggcgccacgatgaaaccgagcggatagcccgctttagcgactttgacggcggcttcgatccgtttgtcgagcggagaagttcccggttcaaagttttttatgacataatccgcattgatgctgaatctgaacctagtctttccgttatgttttgcatcaagcaaatgatcgacgtggtgaaatttagtcacgaatctgagctgccccaattcgctttgtccgaaatgttcaatggctctttttaatgtatgtgtcagatgatcgattccgacgatatcagacgtacaagaggcttcaaatcttgtaaattccggcgctcgttctttcatatactcatcagcctgatccagaatctcttctacattgacatatgtccggatgtaaggctttgaccccatcgtcgtctgcaggtagcaatagtggcaatgccccatacagcctgtcgcaaatggaatggcatattcggcggacggctttgaagaatcgaatttcagtgttttccggacgccgattaccaatgttgatttcgcgttccggtattgctgcaagtgatttttccccggaatattccggacttgattatgcgatgttgtttctctgatctcaagccccatattttcaaacttattcttcagctcttgtcctaacgggtattcgagcgctctcggttctatataaacaagctggggcacaaacggcttcagcatgaactgacactcccttttttcatattctcatgttgttactttccgtttaaaagagagtgaatatgcgttgtaaacatttcctttgatcaatgatatcggtcttcttcaaaaagctcgctgtaaagcgcttccgcttcctcatatgttgaaaagaccgcgtcatcttcggccagcggatgataggtttcgtataaaaacagagacagttctccctcatgatatgggtgatggacgatctccgcctctttaatatgggcaacattggcggcatgcggattgcggtaaatcacatagaccgtatcccccgctgcaaatgattttgtcataataatccctcctgttgaacgttattgttccccccttttttccgaatatgaaaaaaaccagacggcttataccgtctggctgttgtattacttattgaatgtttctttaacgaatgcgacaacctcttctgtcgtgctcatagacaagattgtttctttgaatgattcagcttcttttttagaaagcttgctgatctgcgttcttgccggaaggatggatgtagcgctcattgagaactcatctaagcctaagccgagaagaatcggaatcgcaatttcgtctcccgccatttctccgcacattccgacccatttgccctctttgtgagcggcttcaataacaagggtgatcagacggagaatcgccgggttgtatggctgatacagataagctacgcgctcgttcatgcggtcagcagccatcgtgtattggatcaagtcatttgttccgatactgaagaagtcaacttctgtagcaaactgatctgcgataacggctgtagacggaatctctaccatcataccgacttcaatatcgtcagaaaccgctacgccggcttcgacgagtttttctttttcttcgagaagaatcgctttcgcctgtttaaactcgtttactgtcgcaatcatcgggaacatgatttttaagtttccgtatgtacttgcacgaagcagcgcacgaagctgagttctgaagatttcttgctcttcaaggcaaaggcggatggctctgtagcctaagaacgggttcatttctttagggagctgcaggtaaggaagctctttgtcgccgccgatatccaatgtccgcacgacaactgattttccttccatacgctcaagaaccgttttataagcgtcaaactgctcgtcttccgtcggaagctggtcgcgtcccatgtaaaggaattccgtacggtaaagccctacagcttctcctccgttttcaagaacgccttttacatcgtcaggtgtgccgatgtttgcggcaagctctacatgatggccgtcttttgaaacagtcggttcattgacgagcttcgcccactcagctttttgcgccaggtaagcactgtgcttttcttcatatttctttaacgtttcactggaaggatcgatgatcacatcaccatcgatgccgtctacgattaccgtaacaccgttttcaattgtccctgtagccgcttttgtgccgacaacagccggaatttcaagcgaacgggccatgatcgcggagtgtgaagtgcgtccgccgatatcagttgtaaaaccttttacaaactggcggtttaattgcgccgtatcagacggtgtcaaatcttcagccacgataacaacctcttctgagatcatgctcgggttcggaatttccacgcccagcaggtgccccgtcacacgttttgttacgtcacggatatccgccgcacgctctttcatgtattcgttatccattgattcaaacatagtaacgaacatggaagctgtttctttcaaagcgaattcagcattgactgaatctgtgctgattttctcctttaccgggttcagcagctcaggatcactcagaactaaaaggtgcgcggagaaaatgtcagctttgtcttgtcccagttcttttaaagcatgctctttaattttttcaagctcttctttagaacgtacaatcgcttcatcaaaacggcttacttcagccgcagcatcagcaatgtttttcttttcaaccgttaagtccggctcttcaagccggtatgctttcgcaatcgcaattccggctgaagcgcctattccttttaattcttgcattactcgccgagtccttcgcttttcattgtttcttctaaagcgttaagagcatcgttttcgtcagcgcctgaagcggaaattgtgatttcagcgcctttagcgatacctagagacataacgcccatgattgacttaaggtttactgttttgccgttatattctaagtttacgtcagcatcgtatttgcttgcagtctgtacaagaactgtcgcaggacgagcgtggattccggaatctgctgttactttaaatgttttttgtgccatgattatcattctcctttaaattaaagctattttactacacaatattatatcatacagccgtacttgtcatctgacaagcacggcgtatttatatgcttattttccgattttcacaatatctttttgttcccgttttacggtaccttcggccgaaagggaaatcgcttcaccctcggcaagatttgtaaagacaatcggtgtcattaatgaaggaacatgaggtttaaccgcttcaagatcaacttcaagcagcttttgccccggttcaacccggtcaccctctgaaacaaaagaagtgaatccttcgcctttcaggctgactgtgtcgattccgaaatgaatcaggatctctcttccgccgtcagactgaagaccgatcgcatgttttgtcgggaaaacattcagcacttttccgcggacaggcgatacgacgattccttcttcaggaagaatcgcaaaaccgtcacccatcatttttcctgagaacacctggtcaggcacatcggtaatcggatggatttcgccggtgatcggagaagcgaacacttcttcaccctgctcgtttcggagcggatctgcgataacctcctcaacctgctggctgacttcttcttgtgcggatactttcggttcagggcgcggcgtgcgtccggcgataatatcctgcatctgtgtttttaaaccgtcagaacgcgggccgaaaatggcctgaatgttgtttccgacttcaagaacgcctgaggcgccaagctgtttcaaacgagtcttatccactttcttctggtcgttgaccgtaacgcggagtctcgtgatacaagcgtcaaggtgcttaatgttttcctggtcacccattgcctgcaggatttcataaggaaggtcgccggcttcgcctgaggcgcccgcaccttcatccgcagcctcttcttcacggcccggcgttttcagattgaactttctgatcgcaaaccggaaaccgaagtagtaaataacggctaatcctaggccgaccggaatgacaagccaccaagcggtccggttaggcagaattccgaacaggaagtagtcaatcagaccgcctgagaacgtcataccgatttttacatgcagcagctgcataaccataaaggaaagtcccgcgaatacgcagtgaatcgcaaacaggataggagccacaaataagaatgagaattcaagcggctcggtaattcccgttaagaaacttgtcagagcggcagaacccatgattccggctacaagttttttcttttcaggcttcgcttcatgatagattgcaagcgctgccgccggaagaccgaacatcataaacggatatttccccgtcataaatgttcccgccgtcagctgtacgccgtctttgatctgagccatgaaaatccgctgatctccgcggatgatgtctccggccgcatctttatagctgaaaaattcataccagaacggcgagtagaaaatgtgatgaagaccgaacggaatcaatgaccgctcaatcatcccgaaaataaaggccgccaaggttggattcgcttccacaagacccgtggagaaggaattcagaccgtgctggatcggaggccagatcactaacataataagtccgagaattaatgcggaaattgatgtgataatcgggacgaaccgcttacccgcaaagaatccgaggtactgcggaagttcaattttataaaacttgttgaacaataacgcggccaggaccccgacgataataccgccgaacacgccagtcgccaaagtgggtatccccagcatgttaatataggccggatggttttccgcaaaaaactttgcccgttcaattttgtcagacggaatactgccgttcgccataagcacggcgctcatggatacgttcatgaccaggtatccgataatggccgcaattccggcaacaccgtctccgttggcaagaccgatcgcaacccctactgcaaaaagaagcggcaggttgtcaaatacgatttggccggcgctttccatgacgttcgccacaagctgaacgttatcattgcttaagaaatgcatgacttgaatcatatctttgttctgcatggcattccctaacgcaagcaagatccccgcagccggtaaaatcgcaaccggaagcataagagcacggccgattttctggagaacgccgaataatgctttaaacataaaagatgtacctcctctgttagctagtgtgaccttacagcgaaaattcatgacaacgaattcactggcgcaagtcttcagtttaaccgtttacatttgcccttttacacaacaaaaaaggcatgagtaaaaagggtgtgcaaaataacgggatcgttcttcccgttttttaccctcaatcactcatgcctgatcgaatcagtgacacgtttttaaggtttcaactgaaattatgaaattttattggttaatcggtacaaatgaagcgtgagataaaccgcttccgcctcatgaactggttttttcagtatttgctgcaagatttttatcagtttccaagcagtattgtagcatagcgggtattcatttttcaataataacattaacttttctggttcttttgtctgctcttcccgattaatcctgtctatggtaaatctgatatgccggatcagccgcaaatagtggacgctttctttattcactttcatctggaaagagtcctcaatcacctgaacaaggcgggacatcagctgcgaatgctgattgacctctgaaaggggccgattcgtcagggcggaatggatatgcagagcgataaagccgatctctccttcaggaaggcagattcccgtcttttcattaatcatgccgacgacttcacgggcaatttggaattcttccggataaagcgtttcggtttccatgagaaacgggtttttaatgtcaaacccctgctgcagccgctttaccgcaaaggcgatatggtcagtcagcgcaatatggatatgctcatttaacggttggcttgtccgcttcttgatatgataaatgacgtcattggagatgtcgacaagtgtctcgtccacataaccgaggagctttttaaattgtttttgttctttttcatcctttaagatgaacatcttgtcataccctttatcttcaatgacatccgcttgtttttttccaaagccgatcccttttccgattaagacgacctcactgtatctatcatgtgttgcgatgagcacattgttatttaataccttttcaactgtaaaggaccccttcatgatcctcagctcctttgtcattcaatacctcatatcgtacaaaacgaacggaaagcgcgtcaattctttttttagacggttgatcgttcaataaggcggtaatcaagaactttccttcccggaggcccgccgctgatccggttctcaagcatgtgaaaagcctgctttcccatttctttcgtttgtatatctattgtggaaatacctaacatcttgctgatatcatgattgtcgatgctcaaaatcgcaagctcttccgggatgcgcgtcccgtttgccttggcttcaaggtaaagacctgcggatacttgatcattcgccgcaaacagcgcagtcggtttgtcatcccagctcttccatctatgaaaaagggctttcccgtcaagcagcgtcagcaccttttccacaaccagctcttccctgtaaggctgcccgatcttcttcagcgcctctttgtatgcggcgattcggacttgactgttttttcccttttttctggccaggcagatcgctattttccggtgtcccttttctatcagataatccagaccgtgccgaaatgcttcccgatgtggattactgatggaggaaagccctgccgcatcagtgtactggcagaggatgagcggttctttcacggcaagcaaatgctcatcaggaattgctttggagcagataatcaggccgtccacttggcgctcctgtaattgtgataaggcaaaacgttctttttgctgctcataatctgtctggtataaacaaagatgcacgcctgacgcttcggcagcctcggcaatacctgcaacaaggtctgcaaaatacggaaggttcaccgacggaagcacaacgccgatcatatcggaaaaacctttggataaatgaacagcatgaatgttgcgcgtgtatccgagcgattgcatcgcttttttcactctttctcttttgtccttacttacataaggatgatcgtttaaaactcttgataccgttgtaacggaaaccccggcagcgccggcaatgtctctgatcgtagccatggcgtcccccctttctttttttcccttgatctggaatgcgtttcatacagtaagctagaaacagatacatcctatccgtttgaaaggagaagaacagcgatggggattctttgcttaatcggtttgtgtctggccatactcggcggcagttaccttgccctgcggcccctgaatgaaaagcatgacatcaaaccatttcagcattttgatgattttttcatttaaaaggtgataaaaaaggacgctgcgttccagaaccgtccttttttatcacaaagctttctatttcagaatcgttaattctttcggatactgcgttaatgcttcggcgccgtcttttgtgacaaacacatcgtcttctatgcgcacgccgccgacatccggcacgtaaattcccggttctatcgtgtacaccatgccttctttgaggagtgtgtcgttcgcgctgctcattgatggatattcgtgaaccgaaatcccgagtccgtggccgaggcggtgcgggaaatagtctccgtatccggctttttcaataatgccgcgggcttttaaatcaagatcgccgattctgacgccgggtttacttaattgaagcgccgtctgttcagctttaagcaccgtttcgtaaatctcttcctgtttcgggctgattgattggtatgcgaatgttctcgtaatgtctgaacagtagccgtcaagaataacgcccagatcaaacagaacaaaatccccttttttcaaccggtctgcacccggattcccatggggctggcctgatttttccccgaacagcaccatcgttgaaaatgacatgccctgcacaccttttttcttcagctcaaactcaatctgcgcgagtacttcggtttcactcacaccctctttaagcgccgcgacaccgacttcaactccgtaatccgcgagttttgccgcttccctgagaatgctgatttccttctcatcttttacgagacggaattggttgagcgtttcttctgccgaaacaaatgccgcgcccccagaagcttgtttgagctgttctgagcgggaaagagagatcgaatccttttcaaccgcgatggaatcaagcggcacatttcgttttgtgagctcggctttgatcagctcccacggatcttcgtgatcgccgtagccgataataccatgctcccaaccggcgcttcgggcttgtccgtcttccattcccggacaaacgaaaaacggctcctgttcctgaaacaggaacaatcccattaaccgctcatgcggatccgtgtaaaaatcagttaaataaaatacgttttcctttgtatgtataaacgccgcatcatgtccttcttttttcagccaagatgaaacacgttctaatctgttcattttttgattttcctccttaccaaagtgactctttattcattctatcagttttccggcgtttatgctgtgaacgaacattaaaaaaacagccgcccgatgtgcggctgtcatgtttattttaataatctcagtccgttcagtataaccagaatcgtgctcccctcatggccgattacgccaaacggcagttccatcacctgcagaaagttagcgcagatcaaaaggcagatgaccgagagcgagaaaacaatattctgcttaataatccggttcattttccttgaaagtctgcacattttcacaagcttgtgaagatcatttttcataaggactaagtcagccgtttctagagccacgtccgtgcccccgcccatcgcaataccgacgtcagcggttttcagagcgggcgcgtcattaatgccgtctccgaccatggcgattgtgccgtacgtttctttcagcttcttcacttcttttgccttttggtccggcagacaatcggcaacaaccgtcgtcatgcccgcctctttcgcgatggcagccgcagtttcagactgatcgccggtgagcatggctgtttgaatgcccagtgattcaagctcagccatcacggctttggcttcaggccggatttgatcctttaaggcgaagcagcccgcaatccggtcttctttcttaacaaaaaccagtgtaaagcctttatcctttaattcttttcccgatgtctgcaaaaaagcatctgccgcatgttcacctgcaaatcccgcttttccgaccatccatttgacgccttctatttcagcctgaacaccgaatccggacgtctcgtcaatcgatagatggcctgcgggcgcggcgccccggctttcggcaaattcagctatcgcttttgcaagcgggtggcttgattgcttttctatcgcatataccgcctgcatgatctcatcttcactcacattttccgctgcttgaaatgccgcgactgccggctgtccctttgtgaccgtgccggttttgtcaaatgcgatcatccgtacgcttcccagctgctctaaaaacacacttcctttaaccaataatccgttgcgggccccatttgagataagggaaagcgcagcgggcataatagaagcaacaagcgcgcacggggaggcgaccaccataaacaccatcgcccggtaaaaggtttcactccagctccagcctaaagcgaaatgaggaacgaataaaagcacagccacggctaacagcacgcctttgacatagacactttcgaatcgctcaataaatgcctgagccggtgacacgctgttttgggctgattccaccagccggatgatttttctgaataaagactgttcatttgttttcgtcacacggaccgttaaggagccgtttccgtttaccgttcctgtaaacacagaatctcctgctgttttttccgccggcatcgcttcacccgtcagcgccgattcatcgaggctcgtcacgccagactcaataatcccgtctgccgctacgcgttcgcccggcttaatgacgatcatgtcaccgatcttaagttcagcagccggcacccgcttttcccgtccgtccgcaagcagggtcgcttcctccggttccagtttcatcaaggatgttaaatcacggctgcttttattcatcgtatatgtttcgagcgcgccgcttaacgaaaaaataaagataagaactgcgccttccgcccaataaccgatcagggcggagccgacagccgcaaatatcatcagcagttccacatttaacgccttcgtctcaatggtatcctcaattccctcttttgcttttgcaaatcccccgatcaggaaggcaaggatatacaaagtgacggacaggccttttgtttcggtaaaaaaccaggccgcaagaataaggacgccggatacgagcgccgcaatgagttctgcatgctggagccacctttttccggcccgctcttcttgtatcttctgctgttgtgaatgggtttgtgtcatcacttgttcattcattatgaattctcctctctaattgagaacgcaaatcatcttcaattccctgataaaagtaaaacagccgcctgacaggcagcattttcacagtgttatcgcagtgttttctttattatagcatgccggcggaagatttcaattataattgttttaatttctttatgataataattatcattagtgtttcttcagctgttcattatatgcaaaaaaggtgcgggaggaattcctcccgcacctttttatttctctgaccattcttttaattgtgaggcggtcatcggaccgacgatctttttttcgatttctcctttttcattcagcagaaatgacgtgggaatcgtcatgacatcgtattccttcataagctcgcctttcgtgtcaagaacaatcgggaatgtgagatggtgctgagtgacaaagttttgaacggtatttttatttcgctcggcattcatcaaatttaccgttacaaggcttacatcatcagactgatgctgttcaaaataggtttggaattgcggcagttcttttttgcacggcggacaccacgatgtccaaaaatgcaaaatcgttttctgccctttattcggaatcgatatttcgtctccttcaatcgtcttcatcagaaacacggcgggaactgcctgtttttctgatgaggcttttgcttcaggcatccaaacggcggcagctatcaaaaggactgcacatacaattagacggtttttatgcatatgatcttcctttcacgcgtttcggatagcttgcccttccttattgaaatgtatcagccttttcagctttcgatccggggagctgttcttccgccgcccgtcaaaaacacggagacaccgaggtctttgcagatcgtcacgtaatgtaaacttgtcagaagaatcatgccggtattcataccgagtataatgccgagcatttgcaattccggcatagaaccgagcacatacatcattgaaagacctacaatgctgctccatacgttatgataaaacgccgttttcacgtggccgatgccgatcagacaggcttgaagcggcatcacaaacagatgaaaaagaaaaaacggccacaaaagctgcaaataatactgcgcttccggagactgaaaaaacaaatgggtcagcgggcccgcgaactgaaacatgacccagaccgccggaatgccgtagccgaatgtaataaaaatcgcttgtctcagccgtttcagcacaatatcatattgggacagcgcatacgcttctgaaatgctgggaatcataacgaccatcagcgaatgggcgataaatgcgggaaacgaaccgattgtcatcgctacaccggcaagcattccgtattgatcaatcgcggcggtcccggctgccccggacgccagcagcgctcctttaaccaagaagggttcaattgcgtttgtcaccgcatgaaatatacgaagtcccgttgtcgggatggatacggccaggaggcgtttccgcacgtctttcccgcgaagatgaatgtgctgatggccggaaagcgccctccgcgccaaaataaactgcgtatacagataaacgaacaccacaacatcgcttgcgaccagcacaaataacgaaataagcacggccatatcaatttcaaaagagtaccattgaaaaaagataaacagacaaagcacttgaatgatttttttcaagacattcgcaaccgcgatttttcccatttgctgcacacccataaaataacctctggcgatggatgtaaaagcgacgactggaatcagcccgatgacaatccctttaataaacgggtgatacgtatcgaatacaggaatgaacggcagcgcgatgcttgcggccgcggttgaaaacgcggtaaaaacggcggtcattctgaaggcatgccgaagcatgctttcatgcagcttctgattggattccgcgatgaattttgaaatagagatcggaagctccagactggcgatcacgataattaaaaaaatggtgggcagaatgctcatgtaaagccccatcccatgctcgccaagctcccgcgccagtatcatattcacgacaaattccagacattccgcgaaaaaggcggcgatggataaaagaatgatccctttcacaaatcgattcatggtgtctctccttgtctcacgttcttccatcatcatatgagacaagttctgaaaatattttcgatttctcaaaattgaaaaaagcatagcggggatattttttatcccgctatgcttcttacatcgcaaatacgtgtctgccgatccgttcgataatttttcgggaacggatccagtggtcagatgccgttttcggattgtagaaaaacaacgcgttcgtttctctgcccggatggtctagcgcctcatttgcggcggcgatggaatccttatccggcttttgattaatgcttccgtttgctaccggttcaaatgcattcctttgatagatcacgccccgaatggtatccgggaaaccgtttttttcagtacggttcagcactacgctggctaccgcaaccttccctttataagattcacctttcgcttctgcgtgaacgagacgtgacaggagctgtctgtcagcgcgggaatacgtttttttcggcggctgataagccgtctcgtccggttttgctttcttctcttggtgagatgacagctttatcggttggatagagtgcttatgatccgtttctgagagcttcggaaccgggctttttttatttaaatcagcaaccagtgtgctgggttcttgctttggcttcttcgcaaaagtaaacagagcttctgtatgttcaatttttgatgcaggcataaaacatagaaaaaagacagccaaggcagcaaattttgtcgtcatacgatttcctccttaaatacttcactaccttaacaagagctgtacgcaaattcacggttaaagattttccaatgctcccaatcagcttttatgatggaagaagtttgttaacagccttgttattggcaggaaaacagccgtcattttcacaacattaaccaaatagcagtaaaagtatccatcggagggattttacattttgtttacatctgttacagccagatgaaataagcagcgaaaacaaaaaaagactcctcaagtgcgaggagccgtcagcttcttggctgttctaaatactggaagataacatctccgccctgctgggcaataccgcggaaatgcttaaaatcttcctgcttcgacaaaaccgctcgaaatgcaagaaaatgttctttctgcaccctgaattctttgatttcaccgatgcgcatttggttgatacgttctgaaatttcctcaggcagcaacgaatacagcctccttttctcggctttttcccgaaaaacaatataccatctttcccccgccgggacaatgattgagcgggctgatacccatatcgctttacttcttaaagaaaatactgcaaaatattttcaaacaggatttatgataaaggagaggaagctcgtgaaaattgctaaggttggaaacgtcattgaatttaaaaacggattaaccggtattgttgaaaaagtaaatgaaaactccgtcatcgttgatgtaaccatcatggataattatcgtgaccttgaattagattccctcactgtcgtcaaccataagaattataaaatcatcagagactcctattaaaccccccgaacaatccgaaccatttacatatcccgcacaaaagctgccgcccggcagctttttcaaatgaattcagatctcggtcatttccacaaaaaaatcatcggtctcatctttattgtaaagatttgtgacggatgtatagtagttggttattttaccgcggaattcaagcccacgctcgggcgccttgatgtcaaatgttttttcatacaaaaggacggcaatatcatgatacgtttcagaggtcaccttcaatacgaatgaaatcatacggccgtttttacccgcactttctttacaatcatacattttcagccttacaccgtttaactctaacggctccataacgaacactccttctttttacaggacatgctaccatgctggccattcctttacaattgatccgctccgaataagaaaaaacagcgcagtcctttacaaacatacgttccctattttataatgaaacagacgagctgccatccagcacccgtcacgtattgaagcggcgagtacactccccccgggtttactcgtctttttcttttctccaaatgatctctcttttccttatagaagttctgtgcaaatatcatgcacctttttggctgcgtggcagagacgaaaaatacccccgcttaaaaggcggggtatttaggttatagtccgagtccgtactccgtctgaaattaacgattatcaatcgtctccggatacatatcatgattcatcatccgatgttcggccattttttcgtattttgttcccggtctgccgtagtttgtatacgggtcaatggagattccgcctcttggcgtgaatttgccccatacttcaatgtagcgggggtccattaattcgatcaagtcattcatgatgatgttcatgcagtcctcgtggaaatctccgtggttgcggaagctgaaaagatacagctttaacgatttgctttccaccattttttcatccggaatatagctgatgtagatggttgcaaaatccggctgtcccgttttcgggcaaagcgacgtaaattccgggcagttgaatttaacgaaataatcacggttcacgtgtttattcggaaatgattccaaaacctccggcgcatattcaaataaatagtttgtcccttgattccccaggagcgtaactccttctaattctgattcttttcttgtcatataaatctccctttctattaaactccccgtttattgccccaaagcagcgtatgcagctgaggcaggactctgacgagattcagatccgaatcggctgaaaccttatcaacgagtgtttcgtattttccgagcagatgtgcgatcaatgcccggtcgtccgtcgtatggacgttatcgtttccgacctgaagataaaacgggatattcggataccgcttgtgcacggttttcgcgaattgcagatcttcatcattaaaaatgacgacctttaagctgaccgcgttaagcctttctgccgcatcaagcgaagacataatatgatcgagctttgcaaaatcggttgtcatccccgaacttggcggcttcggtgaaatcgtcaggtcgttaatcattgtgaaccaatcctgatagactgttccctgcgtttctaaagcggcgcgcaccccgtgctctttcagcagcagaatcagcgcgtcaagctgctttaacagcgccgggtttcctcctgagatggtgacatgagaaaaggcgtctccgccgatttctctcagctcgcggtaaatgtcttccgccgtcatccagcggatatcttttttggctgatccgtcccatgtaaaagcggagtcgcaccagctgcaggagtagtcacagcccgccgtgcggacgaacatggttttctggccgataaccatgccctccccttgtatcgtcggtccgaaaatttctaataccggaattcctttagccattcctatcaccttttttcgggcggtatacgcaatagcttgtcggggtttccctgacaaaaacctgcacgcagaccggctgattctccagtgtttcgaggtaggactgcaccttatcataaatcgttttggctacgacctcggtcgtcggcagtgaatatctgtcatcatcagaaaattcctcatggtcattcagcaatgtatggtcataagcgccgtgcaccaatttcttcagcacgctgaaattcacgagaaagcctgaatcgtccagttcatcccccgcaactgtaatatttactgtatacgtgtgcccgtggactctgctgcacgctccggcgctttcgcggggaataaagtgcgcggctgaaatgtgcatgtccttattcaactcaaacgaataaggatgctgaacctgcgggtaaatttgagaaagcaattagttccgctctcctttcattttcatatattcatcatatcctttattgcggagcaggcatgccgggcattcgccgcatccgtccgcaatgatgccgttatagcaagtcagtgtgttattctttacaaaatcaagcgcgccgagctcatccgcaagtttccacgtttctgctttgttcagccacataaggggcgtatgaatgacgaacggcttttccatcgccaagttgacggtgacgttgcaggatttgacaaactcgtcacggcagtccgggtagccgctgaaatcagtctcgcaaacaccggtaataatgtggcgcgcgccgatttgatatgcaagaatcgatgcaaaggataaaaatacaaggttgcgtcccggtacaaaggttgtcggcaattccccgtccttcgcttcaatttcgatatcatctcttgtcagcgcattcggcgcaagctgatttaaaagagacatatcaagcaagtggtttttgacaccgagcttttcggcaatcgattttgccacatcgatttcttcttggtgacgctgattataatggaatgtaacggtttccacttcttcaaagttttgcaaagcccataataaacaagtcgtgctgtcttggcctccgctgaacaccacaaccgctttttcttttttcatgtctttctctcccttatctatcattccataaaaaaagcgcctttttcggagaaggcgccctaaaaaacataaaaaaaccgtatccaaggatacagctcgtccttagttttttatagagggtgtagctagaacctctcccgcatcaatacggattttcttcttttttcacttttgctatcataccataatgttgtttcccgtgacaataaaaaaacagcctgaaccctgtgtcaggctgcaaaagcgggtttaagccccgcgtttcttccccggaaatgccatcagcgcaatcccgatcagaacaaataaagcaggccagaaaacagaaaccggaatgatcggctgatacgtcatcataaagcaaagtgctgtcaaggtcagcactgcaaccggaatgagcagcgccttctgtttcccgccgaacagccacagctcaaataaaccgaatgccgttgccaacaggtaaacaggccatgtcacatcggagtagaaccaattggttgccgtttcaaagacaaacaagatccccgtgatcaataagatgccgcccggtacgagaagccccgcgtttttgacaggtttcgggccgaaaatcggaatgtgaaaagcggcgcccagcaacagaatgagagcgggccagccgcgttcgctgatgacttcatttgcattggtgaatatgccgaaaatgcccgcggcgcacagaaccgccgcagcagtcaaaagccctctttgccttctgccgaacagccaggcttcaaacagcccgaatgcaacggcaaagaggtaaacaggcgatgtcatcgttgcgtatgtccaatccgtcagcgtttcaaaccataacaagccgcccgtcacaagcaaaatgccgcccggaataagaaggcccgatctttttttcggttgcataaaggcagcggcgtgaaacaaaagcgcggctgcgatgatcaaaagcggccacagccccgtcatcagcataccggcaaagcatagtgctcccgcggctgtcaggataaaagcaggaatcaatacgccgatctttctcccgccgaaataccacagctcaaacagaccgagagcaggcgcccatatataaacaggccacgtcatgcctgaatacgtccatcccgttgcggtctcaaaacaaaacaggcagcccagcacaagaaacataccgccgggaacgagcagtcccgcctgttcaggcgtttttttcgcaaaaataaatccggcgtgaaaccctgcggacattataatgaaaagaaacggccacgccgaacctgcggatatatgtataactcccgccttctgtaaaaaaaacgtaatgccgatacaaataaaaataaatcccaataatacacgtcgatccttcatctcttactcctccccatcatttcccaattcattatacagaaatggcaggaaaaaagaagggaattcccaaaatatacagacattttccttatttttctttcgggatttttttgcaaatcaatgcgcccataaaagcgaggctcacatacccaaacaccggataaacggtggaaatcagctgtccgtaaccgatttggctgataatgaaagcaaacgccaaaatgccgccgtaaatatatgtactttttatatgaagaaaactgtttaattgtttttccaatccgtataaattgccgataaccgacgtaaacacttccccgaaaataataaacaaataaatgatatgaagcgaacgcgaatacgaatagacaacttgagccatcggaatgtcaaactccagcacatccggcagcaccgataatgataaaaagctcgcggcaagcaccagtgtcaacagaacgccgcctatataagctccccttctgatcaccttctctgaagacatttcgttcgcaagcggcacaaggacggcttgggcgagcgataaatttaacgcgccgtaagagacggcggacaaaagccagttccacttgtcaggccatacccattcgtccgcgtttctcgtgcttgtaaatacaaatgaatcagctgtcacgataaaagagaaagaaattaaaagcggcaccaccaatatattgacgccgaacacacctttaacaccgcttgtcatgacggcaaaactcagtacgatcgtcagtaggatccccgcttgtgcgggccagccaagctgttcatgaaacagcgctccggctccggacagcatgacagaggtcactcccagcaatataaacatcataaacatgttcacggcgcggccgatggactggccgaataaatatgtgttcaattcctgataagatgctgcatgaatccgtttggaaataatcatgattttggcgcctaaatatgtaaacatcagaccgcttaccacgataccgaacagaccgatccagccaaacttcagaaaaaactcaacgatttcccgtcccgtggcaaaaccggctcctacaaccgtgcctacgtatacaaatgcaagctgacttgcagaaccttttgtttgtcccatttcaccctccggctaaacgcagatttgtccaggcctttatatatgcttatgagacaagtctcccgaaaagacgaacaaatcgtccttccccggaaaaaacagattcagctctctcctctaagcaaaaatattgaaagaaaaaaagggccggcgtatactcttcatcaagaaaggtcaaagcatttcatttcctttccgactatattggtcaaaaataatcaaacctcacgaatatcacttatcatgctgtaaacatttatttttcggggtttgaaacaaaatacttgaaagtcaaagaaggtcagagtatactaataatcaaagaaggtcaaagtttcgaccttattttctaacccatttggtcaaagatgatcaaatatttttcgaggaggttttggcaaatgcgttgtcaacattgtcagaaaaacgaggcgacgattcgcctgaacatgcaagtcaattccattcaaaaacaattcgttttatgtgaaacatgttatacagaattaacccgaaaaccgtctatgagcatggggccgcaatcattcggattcccgtttgagcaaggtttcgctcccaatcaaaataaacagcaggccggccctgaaaaaggcctgcttgacgagctcgctcaaaacgtcacaaacggcgcaaaagcaggtctgattgaccctgtgatcggccgcgataatgaagtggcgcgcgtaattgaaattttgaaccgccggaataaaaacaatccggtgctgatcggtgagccgggcgtcggtaaaacggctattgcagaaggcctcgcgcttaaaatcgctgaaggcgatgtgccgaacaagttgaaaaacaaagagctttacctgcttgacgtcgcttctctcgtcgccaatacagggatcagaggccagtttgaagaaagaatgaaacaattaatgaacgaattaaaagaacggaaaaatgtcatcttgttcattgatgagattcaccttcttgtaggtgccggctctgccgagggatcaatggatgccgggaacatcctgaaaccggcgcttgccagaggcgagctgcaggtcatcggggcgacaacgctgaaagagtaccgccagattgaaaaagatgcggcgcttgaaagacgcttccagcctgtcatggttcacgagcctacaatagaacaagccatcagcattctggaaggcattaaagataaatacgagaaataccacggcgtcacattcagcaatgaagcgataaacgcctgtgttacgctttcatcccgttacattcaggaccgccacctgccggataaagcgatcgacttattagatgaagccggctctaaggcgaacctggaacttgataccgtaaatgaagaagatgcggctgagagactcaatgcaattgacgcggagaaaacaaaagcgcttcaggaagaaaattatgagcttgccgcgaaactgcgtgatgaagaagcagctttggaaaagcagctggcgcatgaaacaccggcctcttcacctgaaatcggcgcggagcatattcaagccatcattgaacaaaaaacaggcattccggtcggaaaactccaggctgatgaacaagtcaaaatgaaggaacttgaagagcatcttcatcagcgtgtcatcggtcaggaaaaagccgtgaaaaaagtggcgaaagcagtcagacgaagccgcgccggtttaaaatccaaaaacagacctgtcggctccttcctctttgtcggaccgaccggagtcggaaaaaccgagttatcaaagacactcgcagatgaactgttcggtacaaaagattccattatccgtctcgatatgagtgaatacatggaaaaacacgccgtatcaaaaattatcggttcaccgccgggatatgtcggacacgatgaagccggtcaattaacggaaaaagtgcgccgcaatccgtacagcatcgtgctgctcgatgagattgaaaaagcccaccctgatgtccagcatatgtttctgcagattatggaggacggccgtctgacagacagccagggcagaacggtcagctttaaagataccgttttgattatgacaagcaacgctggaaccggcgaaaaacaggtgaaagtcggattccaatctgaagagagcgtcatggaagaacaaacgctgattgattcactgagcgcgttcttcaaaccggagtttttaaaccggtttgacagcattattgaattccaatccctgaaaaaagaacatctcgtgaaaatcgtcagcctgcttctcacagagcttgaagacacattaaaagagcgcggcatcagcctgagcgtcaccgatgatgcgaaggaaaaaatcgctgaaatcggctaccaccccgctttcggagcacgcccgctcagaagaaccatccaagaattgatcgaggacgaaatgacagatcttctattggatgacaacgaaatcaaagccttccatgtcgtaatggaagaggacggcatcaaagtccgggcacaataagaaaaaagcggttccctcctcgcggggagctgcttttttgtttctttctccatgccggaagggagaaactgtgaagaattcgggaacaatttttcaatcaccctaaagttccatgcactgccaccgatattaaccatagaaagctagtataaaggatttggtgaaaactatggataaaacatcgattatcggtatcatcctcgcagtgattgctttaagcgtgggcatggtgctgaaaggggtcagcttaagcgcactcgctaacccggcagctattctgattattttgttcggtacgatttctgcggtgatcatcgcattccccggaaaagaaatcaaaaaagtgcctgccctttttaaagtgctgtttaaagaaaacaaacagctgacaattgcgcaactaattcctatgttctctcaatgggcgcaaatcgccagacgtgaaggtctgctcgcattggaagcaagcattgaagacgtggatgacgcatttttaaaaaacggcctgagcatggcggttgacggacaaagcgcagaatttatcagagatattatgactgaagaagttgaagcgatggaagacagacaccaggccggcgcagccatctttacacaagccggcacatatgcgccgacactcggcgttttgggtgcggtcatcggccttatcgccgctctttccaacatgaacaataccgaggcgctcggacatgccatcagtgcggcgtttgtcgccacccttctcgggattttcacaggatatgtactatggcatcccttcgccaacaaactgaaacgcaaatcaaagcaggaagtcaaactgcgtgaaatcatgatcgaaggcgttctgtcagtgcttgaaggacaggccccgaaagtgatcgaacaaaaacttctcatgtatcttcctgcgaatgaacgcgcaaaagtcgctgaacaagaaggagaggcaaacaatggcgagaaaaaagaagaagaagcatgatgacgagcatgtggatgagtcttggctgatcccgtacgcggatttgctcacccttcttttggctctgttcattgtattgttcgccatgagctcggtcgatgcggcgaaattccaaatgctgtctaaatcatttaacgccgtgtttaccggaggcacgggtgttcttgaatattcaagcgtcacccctcctgaaaacgaaaaagacggcgttgatcagttaaaaaaagacaaggaaaaagataaagaacagaaaaagaaagaaagagaagcagccgaccgcgaagaacttgaaggcgtgcaaaagcaagtcaatcaatttataaaaaacaaaaagcttgaaactcagctggaaacaaagctgactaaagaaggactcttaattaccattaaagacagtatcttttttgattccggacgggcggacatccgtcaggaagatattccgcttgccaaggaaatctcgaatctccttgtgctgaatccgccgaggaatattatcatcagcggacatacggacaatgtgccgattaaaaactcacaatatcaatctaactggcatttaagcgtcatgcgggccgtcaacttcatggctattctcacggaaaacccgaaacttgacgcaaaagtattcagcgccaaaggtttcggagagtataaaccggccgtgtcgaacaaaaccgctgaagggcgcagcaaaaacaggcgcgtcgaggtattgatacagcctagaaacgccgcgactgaccaaaatcagtaatataaaaaaggaagcctttcaaacggcttccttttttatttctgatgaaaatgtttagcgtttaaccccactcttttcagcatttccgtacacatttctatctcttcatcactcagcacactgatcatttctttaatttcttcagcatgatcagggaaaatatcgtccaaaagacggattcccttttcggaaatttgtgcgaaagtcactcttctgtcagtcggcgaggcttttctgatgagaagttcttttttctctaatttgtcaacaacatatgtaatacttccgctcgctaataaaattttgtcgccgatctgctgaagcggctggttgcctttgtggtacagcagctcaagcaccgcaaattccgtcgggttcagaccgtgcttatgaatatgtttattcatatggtcgttaatagatcggtacgcacgtgacagtacaataaataatttcaatgagttttctgttttatccgtcatacattcaatcatccttttacaaaagaaaccgttacagagaaacattaataaacaaaatgaaaaatgtcaacaaaaatgtttccaaaatttctcttctttttgtctggccttaataaaataatttgtttttctatcattttggttattttttcttattaaagaagtataaaaatgatataatacctctattcaagtgtaatgttggagcgatgcagagtgaatacatttaaaggtgcccggggaaagatcaaactttatctcatattggtgatcatcccggcacttattatcagctttttcatttatgaaaaagaaaagcagaaaatagccgataaacacatacaggaagccagtatgatgctcaaccttcaccgcaataagctcaattatttaatcggtgaaacaaaagcccggatgacaacacttgcgatcgctgtcgataagcctgtcaatgaagaaaagatcattgatattctcgatcaggcttttgaggatgaacccagattcagcggtctgtatatgctgaattccaaaggtgatgtcatcgcaagcacgactgatctgaaatcaaaggtgaatttggccgaccgaccgtattttacgaaggcgaaaaagacgaaaaaaacggttatcacaaatgactactccagcagaattacaggccagcgcatcttcacgatctgcgtgccggtgttagacgcaaaacgggaagtcacggattatttagtagccgccattcaagtcgattatttgagaaatatgatcaatatgctgagccctgacgtttatgtcaaggcaaccaatcagaataaagtgatatttgccagcggacgggctgatcaatcagaaggggtgaaaccggtcagcggctatctggatgatattaattggaatatcaatgtttatccgaaaccggttgagctgaacgagctgaccaaaagcgtactgctgccgatgtccagtattgccgtgctgctgaatattctgttcatcctcgtccaatattatctgcttaagcgcaagacccagctggagcgcgctcaaaatgaagcgcagaaattggagctgatcggaacgcttgccgccagcaccgcccatgaaatccgcaacccgcttacagggatcagcggcttcattcagcttttgcagaaaaaatacaaatcggaggaagatcagctgtatttctcaattattgagcaggagattaaacggatcaatcagattgtcagtgagtttttagtgctcggtaaacccactgctgaacggttggaagtgaactcgctgcaggatattcttgatgagattatgccgattatttattctgaagggaatctgtataatgtggaagtgaatgtggagattctcgtcaatcggccgctcaaggtcaactgcacgaaagaccatattaaacaggtgattttaaatgtcgcaaaaaacgcgctggaatccatgcaggaaggcggccggctgtccatctatttagaagcccgcgaccataaagcagtcattaaggtggccgacaacggaatgggcatttctgaagatatgcttgaacacatttttcttccgtttgtaacgtcaaaggaaaaaggcaccggcctcggccttgtcgtatgtaaacgaatcatgctgatgtacggcggttcgattgacattcaaagcgaagtcgataagggcacagaggtcaccattacccttcctgccgcttcacgatgaaaaaaacaccctgggtcggggtgttttttatttaaagaagaatatgtgtaagaggatataccagaggaacggcatcatagccggcagatagtacgaggcgcttcgtgagccgtgccagcggaaaaatctgctgactgtacgcggtcatctttcggatgcggcgcttgatcaggaagcgcattcagtcttcgttatctgttttatcatcaatcatttgtttgcttcatatgcaggcatgacgtcaccgcgggagaacaagcctattttcttcacaaggccctgtattccttggtgatgtgtgcgatcacggtttaccagctgctgatacgcgttcatcagacagtccagttcctggctgtgcctgatcgtgtcatatccggtaaacccttgtctgttagccgcatctatcatcatttttctttttttatcaatagatacaagcaatttttcttgttcagaataactgcccattcacttcacccctcaccgctaaaagaataggaaacaagtttgattgggttattgagcattattacagattatactttatttgtaaacatttttttactaaataacttattttttcatttcatattggaatctttagcatgaatacgagaataatacccattcaggtaatgatataaacagaatgcggcatattcaagatttaaaaaacagccacagctgactttatattacaataaaaaacctctcataccggcgggggcatgagaggttcgggcgtctatcagttttgcacactttcattttcgtaaatcggcacccagccctcagtcgtcacgaaaattcggattgcgacgacccggcggtcttcctgaagcgtaaagtagtggcggatgttctccggaactgaaatcaaatcgcccggatttaaacggacgtcgaaaaatgtgccgtctttgccttgaatgacgaagatgccgtgtccgctgacgataaagcggacttcatcatccgtgtggtgatgttctctttggaaattttttaataattcatcaagattcggcgtggtatctgataaagaaatgacatcctgagactgatatccgcgccgggctgaaatgtcctgaatctccgtgtcaaacgccgcgagaatccgttctttttcatcttctgtcagattgtatttctccgaaagctcagacggaagtttttcaatgttccactgctcatagatcacctcttgttcgtctaaaaagcgcgctacttcttcctgattttcaatgagcgtattcttttcgtcatgtattctgatggtcgccattttccgttcctccttttattttacaagctgcggccgcagtgacagaagcttgaggtggcagctgaataaaaattcataggcttccagcacccttttcgcttcaaatgcggtccgcccccatgccgtaatgccgtgattacggattaacaccgcgcctgagccggcgtccgcatggtgcgcgaagttttcggccaatgccgggatgtgcgccgggttgtcaatgatcggaacggtcacggacgcgttttcctcccataatccgagcgccttaatcatctcctgcccctgaaacgtgatttgtttttcatccccgtaaagctctgagatgacattattattaacggtatggacatgcagacagcagccggcttctgtcttttggtataagtaagtatggagaagcgtttccgctgaaggttttaaagaatggccggtctcagcgggcttcccgttctcatcgattaagagaaaatcttcgtctgtttcttttcgtttgtcttttccgctcgccgtaacgaggaaagtcagcggcgcgtcggatactttgatggaaagattcccgctcgttgccgggaaccagtctctttcggccagctcgcgctttacctcggcaagttcgcgccagcgttcttcttttacagccacgcctgcacctccccgatgttttcaatgcctgttttcacctcatgaaaatcttgaaaaggcagatgccggaggccgagttctttgcattcagtcaaaagataatctctcgcaaaacacatatcggataactttgcagcctcaacatccgtgaccgaatcaccgatcataatgagaaatttctgctgatcggacagcttccggatgactgacggtttgcagcagccgcattgattggtgcagcctccgtcacaggcgtgcggccagtctatatgaatatattcattgtcaaaggatgcatgattgcagaaaatccgctccttttctacgatcccttccaaaagcggatgcacaaaaaagtccattcctccgcttacgatataaaacgggaggccgtttgaccggacaaacgagacaaaatccaaaaagccgtcccgtattttcgcatccttcagaataaagtctgtcagttcttcttttaagctgctcggcagcagtccgaacatccggccgactccttcttggattgataggcttttagacagaacaccgtcttttaattcaatccactcagggggcgcgaattctttcatcatgctgacaatgttgtcgttcatggtgaccgttccgtcgaaatcacaaataatcagcggtgtgcgggtcatacggcttccacccttccccatttgtctaatgcgagctgaagatctttgcacgacgcggctttttcttcaatcggctgcgcttcaagcaccgcatcaatgatggcgcggaacgctcttccgccgccctcggctcctttcggatggccgtgaatgcctccgccggcattgatgatgtgatcgatgccgaaatcgcgcatcaacaatggcaccataccgggatgaatgcctgccgacgggacggcaaacgacggatgaaagacatcgtcttttacacattcatcatggattgcaagcgcggactccttcggaagagcaacggatccgtaaggtgacggaaataaactgaaatcagcgccgcaatagcggttcagcttgccgagcaaaagcgcatgcgacaagccgtaaacgggagatgaagtgaacgcgccgctgactgccggatgcgccatgatcggaagcgggatttccctgtcttctgcaaggctctgcatcacatctaaaccgtaagcgaacacattcaataaaagcgcgtccgccccgagttctgccgcgcgcctcgctttatcccgcagttcagcggtccttcccgtaaggtttacggcatacagcgttttatgccccgtctcctcccgggtttccttcaggacttgttttccttcgataatgcgggtttcaaacggagccagttcattttcaaagaaaatttcgtcatctttaatcagatccacgcctccgagcgcctgctgtctgagctgttctttaatgtcggcgagattccgtccgatcacgcctttaaatatgctcatcagaagcggtctttcaaattcgcccagcagtttgcggatgccgtatataccgaatttcggcccgggaagggagcgtttaaacccttcggaaaattcaagatcagtcaattttatttttccgtccaatgacagctttccgaataccgtcgtcaggacggccggaatatctcttgaaaagttcgcctcgggataggcgatagtgatgacggattgtgtttcgttttctgaggttccttctttctcctcaacttttacgacccggcctttatgttttctgagctgttcctgcttcaccaggggcaggtcagtccaggagcctaccgtcagccccgccgcaatctgttccgcccgcttttcactgtccgttgtgtctgtcagaagatatgttgccaatacttcgctcatgcgtgaacgcctctctttctttcacaaaacataaaaaaacctcttccgtatgagcagaaagaggcttcgtgttatgtccgaatcttatctctcagctcctgctgcaagaattagcaccgtgctttatcagtcggttgccgggcttcatcgggctcgtccctctgcctgctcttgataagaataatgattttataaagtattttgaattatcgcattgttatccagatatgtcaatgctttttcgggtgaaaagattcagtttcccgatccgttccgcagcttctttaagtctttcttcacttgtcagaagaccgactcttatatagccttccccccattttccgaacccgtttccggcagcgacggcgacatccgctttctcgagcagcagatctgaaaacgactgtgacgtataaccgtcgggcacagggagccatgcaaaaaaggagccagccggagccgtcacatcccagccgataccgcggcaggcttcaatccatgcattgcgcctcgattcatatctgtcattttgcgctgcgacgcatgcctgatcctctaaaagagcggctgccgccgcctgctgcgccgcgggaaacaggctgacaaacatatgatcctgataaagattgatcgcttcgatgacagaagcgtttccgacggcaaatccgacccgccagcccgccatattatacgttttggacaaggtatagacttcgattcccgtctcctttgcgccttccgtctgcaaaaagctcagcggtttatgcccgtcaaagccgacggctccgtacgcgaaatcgtgaacgacacaaataccgttttgttccgcaaaaccgaccgtctcctcaaaaaacgcctctgtcgccacagcgccggtcggattattcggataattgagatacagcagcttcgcctcgctccgcaccttttcaggaattacgctgtaatcagggagaaaccctctttcttccgtcagcggcatcatttccattttcgctttcgcaagggcgacgcccgaccagtaatcaggatatccgggatcaggcaccagaatggtatctcccgggtttaaaagacattgcggaagctcaacaagtcccgccttgcctccgaacagcacggcgacttccgtgtccggatcaagcgtgaccccgtactccctttcataaaatgcagcggctgcttttttgaagctgtaagcgccccggaatgatgagtatttatgattttccggcctttcgacggcgcgcttcatttcttcaacgatatgctgaggcgtcggctgatcagggtttccctgccctaaattgatgacgtctctgccttctttcagcttttgatttactttttgcaccaatgatgcgaaaaattgttccggcagctgtttgagtacatctgagatttcaaagttcatatttttcaccttctaaaaatgtcttgaaatgatagtccatcatcatatatggttaaataaaaaaagtaaagagaaacttgaggtgttaaaaaatgaaatggaccgtttcctgtttgcaatttgatatttcatacggaaatccttcagaaaattttaaaaaagcggaatctttgattgagcaagaaagccgccatgcggatgtaatcgtgcttcctgagttgtggacgaccggctatgatctcacacggctagaccagctggcggatgaaaacggcaaagtttcggaacaatggcttaaagaaacggcaaaaacatacaacgtacacctcgttgccggatcttttgcggtcaaagaaggcgaaaatgtctataacaccatgtacatcgccgataacagcggacagatcgtgaagcggtatcagaaagcccatctgtttcagctgatggatgaacacctttacttgtcagcgggaaacagcgacggttcctttgagctcgacggtgtcaagtgcgccgggctgatctgctatgatatccgtttccccgaatggatcagaaagcatacgtcccagggcgcgaatgtcctgtttatctctgcggaatggcctctgccccgccttgatcattggcgaagcctgcttatcgccagagcaattgaaaaccaatgttttgtcgcagcctctaactgcacggggtccaatcccgataatgaatttgccggccacagcctgattattgacccgtggggccggattttagccgaaggagaccggacggaaggcgcagtccgggcggaaatcgatgtgtcagaaagcgcggccgtccgcggaaccattccggttttccaagacttgcggcgtgatttatattaattttcaaaaaaatgttgacaagaatatccggcacctgctaatattttcatcaactgattaatccgaattgtgatacaaatcaatatattttctcttatcgagagttgggcgagggaattggccttttgaccccaacagcaaccgaccgtaattccattgtgaaatggggcgcgtacattttgcgccgagacgattgtctcataaggcacggtgctaattccatcagatgttatctgagagataagaggcggactgcactgtttcagcctccttctctttcagagaaggaggctttttttcgggcgtattctccgtcacgatctcttactgccactacataattggagggtaaatccatgtcagcaactaaaacaagtctttatgaacaattaacagaaagctccgccgccgcgttagccgtcaagctcggcttattccaaagcaaaagcactctgacatgccgtgaaatcggcgacggcaatttaaattacgtctttcatgtttacgataaagaaaaccaaaaaggactgattatcaaacaggcgattccttacgcgaaagtcgtcggtgaaagctggccgcttacaattgatcgggcgagaatcgaaagcagcgccctcatccgccagggcgaacacgtgccgcacctcgttccggccgtttactattccgatactgaaatggccgtcacggtaatggaagacctctcacatttgcagatttcaagaaaagggctgctggaagggcagcattatccgaacttatcggttcatatcggtgaatttttagggaaaacgcttttttactcatccgattatgcgcttgatgcgaaagtaaagcagcagctcgcaaagcagtttacaaatcctgagctttgcaatattacagaaaggcttgtgtttacagaaccgtttctcgaccatgagaccaacgattttgaagaggagctgcgcccgtacgcagaaaaagtttggaacaattcccggctgaaagaaggcgctgacgaattgaaagccatctttctgaattccgcggaaacattggttcacggcgatctgcacacgggaagcatcttcgccgatgaacatgaaacaaaggtgattgatcccgagtttgctttcttcggaccgatcgggtttgacatcggccaatttatcgccaatctgctgttaaacgccctcagccgcgacggtgacgacagacagccgttatatgaccatactgccgccgtatgggatacatttgtgaaaacattcagtgaagcatgggagaaagactgcctgccttcccacagacacctgctggaagacacactgaaaaacgcgtttgaggaagcggtcggttttgcgggatgcgaattgatccggcgcacgatcggactcgcccatgtggctgacttagatgaaatcactccgtttgacaaacgaatcgaacggaagaagctggcgcttgagatcggcgcctattatatcgaaaacagaaaagaactgaagcatatcaccgaagttctggaccaatttaagctccgtgtaaaggaatgatgcagcatgaccaatgaatttgccatcccccgttccgtggaatggaaagaaacctacatccgcattttaaatcagcaaaaacttcccgacgtcactgagtatgtggaacttgaaacaaaggaagatgtattcgacgcgattgtcacgctgaaagtaaggggcgccccggccatcggtataaccgcggcattcggactcgcgctctccgccaagtcatttgaagcccgcgacctttcagatttccgacgtcagttcgcggatgtcaaagcgtatttaaacagttcgaggcccactgccgtcaacctcgcgtgggcgcttgacagactgacggattccatcagggatgcaatctcaatcaatgaagcgaaaacaacgctcgttcatgaagctattcaaattcagattgaggatgaagaaacctgccgaatgatcggccaaaatgcgctgcacctttttaaaaaaggcgaccagatcatgaccatctgcaatgcgggctcgattgctacaagccggtacggtacggcgcttgctcccttttacttagcgaaacaaaaagacctcggccttcatatctacgcatgtgaaacaagacccgttctccagggatcccggctgacggcgtgggagctgatgcagggcggaattgatgtcacactcattacggacagcatggccgcccatacaatgaaggaaaaacatatatcagcagtcattgtcggcgctgacagaattgctaaaaacggagatacggccaacaaaatcggaacttacggcctcgctattttggcaaacgcctttcagattccgttttttgtggccgcaccgctttcgacctttgacttgcagattgaaaacggcgatcagattccgattgaagaaagagatccggatgaagtcagacagatctcaggcatacgcaccgctcccgaagatgtgccggtcttcaatccggcctttgacatcacaccgggcagcctgatttcaggcattatcaccgagaaaggaattgtgaccggttcttacacggaagaaattgaacaattattcgcagactgtcagctgagctgaaaaaccgctgatgatgttgcctcgggcaatgtcagcggtttttttgtctgcacaatgtaatcacttcatctttttgggcggctgtaatgagatgcattttaaaaaacagctctgcataaccggctatcttttgcggacggctcattttcatcaggcttcgtcctcctttttcaccagaccaacttttttcacttaataaaatgatatgtcggacgcaaaaaaacggaacgtgccatatgttttatttttctttataggatatttgttcgatgttcagcagcaccgcttttacatccgtcttcgtgcccgcgtatcccgttaaggcgctgtttttgccgattacccgatggcacgggacaaaaatcggcagccggtttcgtttattggcttgtccgatggcgcgcaccgctttcggttttccgatcgcttcggccatatcgccgtagcttcgggattccccgtaaggaatcatcgtcagcgcgttccataccctttcctgaaagggtgtgcctttttgtctcaaaggcagagagaattgctttctttctcctgaaaaataggatgccagctgctgtttcgcctccgacagcaaagcggtttcgcacggctttacgccgggcgcgtctttccgccattcctcaaaatcttccccggtgagaaacaggccggtaataaagccctcttcctctgttacgataacggttccaaacggcgcttttacacttgtaaaacagatcattccccgctccttctttcttcggtattctgccggatcggaagcgtcaaatgaaaaaccgtgcccttcccttcttcactttccacatgaatgcgtccctgatgttcttcgatgattttatagctgaccatcagaccgaggcccgttcccctgtcttttgtcgtgtaaaatggctcgcccagacgttttaatttgtcttcggaaatgcctgttccttcatcttgaaaagaaatcaaaatgtggtcttgatcagaaggctggatggtcacgtagatattgccgccgcccggcatgacttcaatggcgttttttaaaatattgataaacacctgttttaattgattcggttcacagtaaatcggcgggatgtttccggtcaggttcagatgaatctgcacattgacaagattggcctgggcattcaaaagatcagccgtgtctttcagaatctgcgtcacgtctttttcttcatataatatcgcctgaggtttcgctaaaattaaaaattcagtgatgatagactcgatgcgttttaattctgaggtaatgacgttaaagtacagggaatattcgccttcaatgcttccttgaagaagctgaatgaaccctttcagcgctgtcatcgggtttctgatttcgtgggcgatgcccgccgccagctcccctacaacatgaagagtgtcggatttccgcagcctctcttcaagttctttggcctctgtgacatctttaaagatggccagattcatattttgaatgatatttcttttgaaggagaattccagtttgcggctgtcactgctgcttaacaggaaggggatttcattatccattccttctaaatcaatctttctggcgggaacacccgcgttttcaatatcaaataaagaaagaatatccggaacggtgtacgctctcagctcctcatccggcatgccgagtatacggcttgcgagaggattcgcgtcaataatgcggaattggttgtcaaataagaccttgccgtccattgagccgttgaatacttttctgaatttcagctcgctttcccgcaattctttttccatccgcttacgatcgctgacatttcttaaaatggttaaatgctgaccttcaagtatggttcgttttgatgtaaactcaagctctttgtattggccgttcgccatctgaaacagcatttcttcacggatttccccgtatttttcatatttcttcttaatctgcttgtattttttctgcggatcaacgataaacgtacataaattcgtctccagcagcttatccatcggcagttcgaaaatgcggcacgccgattcgtttgctttggcaatctttccgtcatcagaccaaatgacaatcgcgtccatcgcgttttcaaaaatttcgcggaatcgctcttcgcttttaaagagtttcaattccatcaaccgtttctctgttatatctctcataatggacatgtagaacccgctgattaagttggacgtaatcgtaaattcaaacagcttctcttcgccggaccgaagcttgacgggcagttctcctttggcatttccttttctgcggagggtttcccagatttctttcagatgctttttgttttcgccgtcggtaaaatggcggagcgacagatgggacaattcattctggccgatctcaaagcttttgcaaaaagagaggttcgcatcaataaacccgccgtccttatcaaacagcacgatgccgtcgacagccctgtcaaacaaatctttaaacagctgctcgttcatggagaattcgcgctctaatatttttttagaggagatgtccctcatcaccacaaaaaaataatcctccccaattccgtctctggcgaggaattcaatgtatttcgtcgcgccgctgtcaagcttaatcggcacctctttccacagatggcctttttttaaaaactttttcacggccttattcagttcttcctgaggcacggaatataaaaagtccaggacggagcggttaataaggctctctgcctcaatctgcatcatccgggccgcagcctcgttcgcctggacgattttcatttccttacggcatataaaaatggcatcaagcgtgttattcataatcacatgataccggttcaaatcactcttcaggcggtcattttcctctttcatccgcttcagctgctctttcagcgactcgtttgtttgcaaatccagagtttcagccattcagtacactccttcttcaaaaacctatccttcaatatttctacaaaatacctcatcttccttcattcgccctatacatttcagaaaatttcaatgatatgacaagttaaagtctttttctacgatccttacctccccgttacatcatcctaacaatcccttttgtcctccttcaattttttgttttttattttaaaatgaacaccaacaggaaataatcatgcagtggatgatttttgaagagaaggtgatgctatgacaaaatcgcgagacagttactttgacaacgccaagtttatcttgatttttctggtggtgttcggccatatcctccggtcatttattaacggaaatgagtttatgctccatctctacaaattcatttatacttttcatatgccggcctttatcctggtttccggctatttcgcaaaaaactttaagcggaaaggttatgtgaagaagctggctgtgaagctgattattccgtacctgatttttcagggcatttactcggttttttactatttgattcaggatgaaagcatggcaagcgtcaatccgattgatccgcagtggtctctctggtttttagtcagcttattcttttggaatctgctgctttatccctttacgaagctgccgaaaatgtgggcgcttggggcgagctgcgggcttgccgtcatgatcgggtatctcgatttcatcagcagcacgctgagtctttcacggacgtttgtctttcttccgatgtttctcgtcgggttttatttaaagaaacggcactttgatttgcttcgggctaaaagaggcaggcagattgccgcgggcgtactggggattgttttcctcttatgctggtgcattgattttgattactcgtggctgttcggatcggagccttattctacattcggcacagtgtcgctgttgagcggtctgtcgcgcatcggctggtatgttttggcctttgccgccactttcagctttttggcgctcgttccgcaaaagcgttatttctttacgaaatggggtacgagaacgttttacgtgtatctgctgcatggattcattataaaaacgctgcggcagatcgggcttgaagatcacttgtctgattatcagaatttagtcatgctcttaatgttaacggccgctcttacgtccattctctccagcaatgcggtgaaaacggccgcacagccgtttattgagctgcggataaccggcttgcttcaagcggtgaaaggaacaagaaacggtgcttattcgaaataatgcaaaatacctcttaagcgttgccgcttaagaggtattttttattttttgccgtcttcttttttcttcggcttcgtctgttcaagcgtttcaatccattttccggcgttataatcaccgagctcgcttgaaaactcttcttcaagcaatttagggtccatcggctttttatggttttgcatgtctttgctgtggcggttttttttcgtcatattactcgcctccttgtttgccgtgttttgatttgcggtttgcgcctctcagtccgggatcaccgtcatattgtgttttgtatgcatctttgtccatgctctcagtcggtgtattgttgttggtcaaagcttcattctttgctgctttgcgtttcatttgatttcctccttctgtcagcaaatctgttttgaattcattaagcattttttttaagtcgcgcactgtcacgtttttggcctcatcaatgagttcatagccgatctgtccgttcggctcaagcagcacatatttaaaatcttgaatgtctccgaggccttcctgcctgatcctcattgacagctggtcttcggtaaaacgcattttttttaagttttccgggatgatttttccgtttctgacaacggcgacggtttttcctgaaaatagaaactcaaaaaagcttgatttgatttctaaatattccatcagaatcagtaccgcaataaaaatcgccgccgcgaaaatggtttcccataaattatgttcaataaacggctgaataataatcgagccgatcgaaatcatgatgactgtctgggtcaccgacagctggctgatggatttccgtccggcaatccgcaataaaaaggtaccgaccgcgatcataactaccgacttccaaaatacggcaaacaatgacgtcacctctttacaagtagaatctccaaagaaactgtttccactcatccattttacggcaataaaaaaacaccgctttctgaaaagcggtgtcagccgataatcatcctttccttcggataatgataatttgcttcgatttcttttcggccgatcaaataaaggaaagtcaaaatgccgatccggccgataaacatcacaatcatgatcacacattttccgatatcgcttaaatgcggagtaatcccgagcgacaggccggtcgttccgaaagcggaacacacttcaaaaagcagtccgaggagcgtctgatttgtctccgtcacggaaagaatcagcgtcgacccgaacacgagcagaatcgccatcatcgtaacgaccagcgacttcatgacatcagcctgatgaagctcgcgtttaaagaccttgaccgctttattccctctggcaaaatgaaacagagcaagaaggttaagcgcaaacgtcgtcgtacggattccgccgccgaccgagctcggtgatgcgccgataaacatgagggcgcagatgaaaaataatgtcggcgccgacagctggctgatatcaattgtcgcaagcccgccgcttcgcgtagcagttgattgaaagagacataaaaataaaacatcatgccagcttttccccttcataacatggcttgcttcaagcgcgtaaatgcccacggctccgaacaaaacgagcattccgaacgtaacggtcgtaattttcgtaaacagcgtgaatgagtatctgcgctgttttgaaaacaaaaagtcttttacttctacgagcaccggaaaaccgatcgcaccgaaaataatcagaagcatcgtaataaactgcacgaaatagtcatgtctgaacgggacgagtgaatttcccgtaatatcaaagccgccgtttgtcgtggcgctgacgctcgcaaagaatccgtgcaagtacgcctgttcaaacgaatcatagtatgttaaaaaatatgttcctaagatgatgccgcctaaaaactcgattaataaaatcaaaaacagcacttgcttcatcaggttgacgataccggaaaactgcgattgattctgatccaccataatgagcttccgttcccgcagaccgatccgtttgcccataatgagccagacgaatgttccgagcgtcataatgccgattccgccgaattgaagcacgaaagccaaaatgacaatcccggccgtgctgaatgtatcagccgtgttgacgaccgttaaaccggtgacactgactgagctgacagccgtaaacagcgcgtctataaacgaccagctggccccttgtttgtgggcggccggcagacttagcaaaataaatgccaccgtcacagcaagaaaatagtataatgcaatcagctgtgcaggcgacaagatctgtatgaatttcttcagttttaatttcataagatagttccttctgcctctcaaatgtagtacgtaattattctaatgatattgggagaatttttaaaggccttttttgaaagatttttcattaccttatgtaatttgccgatctttaaacaaaaaacctctgaaacgattgtcagaggttttgtttattattttgcttccagcctgcggatgcgctcatcgagatcagggtgtgtggagaacagtgacgaatgctttttgccgttaatttttaacgtctgcaccgccgtctggtcttcttcattcacatgtcctgtataagacttcagcgtacgcagggcgtgaatcattttatccttgccggcaaggtctgcaccgccgcggtcagcgtgaaactctctgtggcgcgagtaggcgaagacgacaagactgccgagaatggaaaagataatctgaaacacgatcatcgcgataaaatgcacgaccggtgcgaggtcttctttgacaaagcggcttgcaacccatgccgcgattcgggaaaggaatacgacgaacgtattgacgattccctgcagcagcgtcatcgtgaccatatcaccgtttgtgatgtgtgcgacttcatgggcaagaaccccttccaccgcagcatcatccatctgctgcaataaacctgaagaaaccgcgacaagcgaacggcgcttagaaggtccggtcgcaaaagcattgacctccggggactgataaatgccgacttcaggcattttcgtcatccctgcggcacgggacaatctgtgcacacggtcaaccaattgctgttcttcatagctgagtgactgtttcttcggatttaacacccggacgcccatcatcgttttggccatccatctggacattccgagagaaataaaagaaccgacaaaaccgacgacaagactgaacacgagcaatgccatcagatcaatgcggccattttgtatatacgagccgacaccggtaacgcttgtaataatcgtaagcacaattccgattgtcgtaatgaccaaaaggttcgttaaaataaacagaaatattcttttcgccataattacctccgtcttttttaagatcaaaagaacttatttaattaaattataaatgatctgtttgaaaatgcaacaatttcgacgtatgatgtaaatgtaattctcagtgatatcagaaagtgaacacgtaatcaatcagaggtgaaccatgaacacgtttaaactgacccgaactgatatggtccggcttctttacgcgttaaaaggccaaggagacgcaactcctctccaaatcttattgcaatcagcggaaatgacattggatgaagcggaaagccgtctgcatatccctgaatttctgacgagattcgaacgaaaaaaagagaaaaaggaatacgggctttcaactaacgagattgtcgagctgggaaatctgtgcgagctgacgtctttaaaatcaaccgccgtccaaaactgggtgaagcgcgatattaaagatttaatcggccaccccttactcggcaaaaaatatacaattgaacaagctgtcatccttctcattgtacgtgatttaaaatcaatttatgacttcgaacatatacgcggcatattaaaaatcgcttttaacacgatcacagacagatcagacgacgtcatcagcccgatcagctactatgaaagctgcgcccaagtgattgattatcttcatcataaagcaaacccgccgatgaaggaaacgagcctgcaggagctcgtcgaagagcagacggacaagctcaaaggctgctttaaagaactcggaagcggacaatggaacgatatcagatccatcatcgccgtcacggtgctctccgttttgactttccatattcaagcctcagcctacaaaatgaccagccatttattataattcataacgcttcttcgccccggtgtctgcgccggggttttttgctgtacaacaattgccagcataatcaataccgttccgtttgaaactaaaatgcgtaaacacatcttgccagagaaaaggagatgaaaaagatggcgagcagaaataaactcttagttccaggggctgagcaggcacttgaccaatttaaatacgaagtggctcaagaattcggcgtgaaccttagctctgatacagcagcacgcgcaaacggctctgtaggcggggaaatgacaaaacgtcttgtacagcaggctcaatcacaattaaacgggaaaaatcaataatgcagcttattcgccgggacttctcggcgaattttgatatttatcggcattctcctttccgtgccggtagccgttcggattcctgcggtctgacgaatcttcatgatgccgataggagtcccaatgttcattgcgatcatgattccgctgattccagtaatgattgtaatacttttgcttaggctctttgtcatttccgttttcctgaggattttgtgttgggggctgctctgtttccccatcttgttccttctgtgtgttttcttctgatccggaagctgcatttttgtcggtttgctgactgccgtcctgactgtccggcttcgcttcttccgtgccgggcgttgtttcattgttttccggcttctctgctgccttttcttcatcaggagctgtcttttcatcagccgccggcttttctgtgtccggctgtttgctttgatcagcgtctgtttcggtatctttttgatctgtttcattgccgtcggtttgcttttcagactgtttttcttctgttttcttttcgtttcttcttatgtagctgcctgttgacatcccttcctgttttgctttttctcttgtttccatatcagattcaagagattggacctggtaggtgcccttatatttttcagtcatgtcagccagctgttttttaacgccttttttatatgtattgtcatctgtattttcataaaccgtggaaattaaaatctcttttgattcctttacatatccatgcttgctgcaatcggtaataatattattgatgacttccttaaaatcgctgcttttccaatctccgatgtcactgatgacctgtttggcgtcatggttcagcggtgtcagttcaatgacttcatatttgctgtttaaagccatttcaatgctgggattaatgtcaagcgtcatatacgcgtaagctttgttatcagaaaaaaccgggagcaaaattaaaataaacaaaataatagcagtcatcgtaaacactcccaatttaaaagggcgcagtttcagaaaatcaaaaaagctggcccttcttcccatacgcgtttcgccttcgaacgtaatttcctctccgatttcacaagtgcggtgatcattttttgtttttaaaaattgtccgtcaggggttagcaacgtgacgaattttttatttttctctactatgatccctcttctcatgagtgcaacacccctttaagataatcttttaaataaatataatcaccggtaataataatactcatggcgatgatatattttcggttccgttcaatcgtttttctgctgaccgacacaagctgctccagctgtttgacaggaagctgttttttctggtgcaaaatggacgccagctcttcattttcaacaagcgtgtaggctaccttaatcgcattctgcctcgcatcagtatgcttcggcgattgttccagcagctctttaaaagacaggccgtattctttcagctgcttctgaaaaaaaagaatttcttcccggcgctgttcctgttctatctgtttgcggtattcatcaatggaaagctccgcttcgataaggctctgcgaagattcctggtcgtcgccctcctgcacatccatattgatatgctgagcggttcttgcttcttttctgatatagtctatcacttttctttttataatcagctctgcaaatgcaagcagcgaattacctttttcagccgaatacttttcaatagcttcgttaaacgcgatcagcccgatgctgaattcgtcgtctttttcatctatatatcgtttacaaacggatgaaaccgtcttcgcgataaaaggcttatattgctgtattaaatcgttctgcagatctttgtcgcctttttgtattttttcaacagatgtttcaagcgtttgcttcttttttcccaatttaaacaaaaggctaagcactggtttcacctcagttcctccctataactactcataatcatagctaatttagtagggattcgcaaaggaagaaaaagagaaatcgatttcatttgtctcaattatgacaagccaataagacgtactatacatgatttcgtgcccccatgcagaattaagggggttttctctgtgttttttgtaacaatgctgttataaaattgttatcatatgtcttaaatgtaagcgcttcaaacaaaaaagggaacctgctttctaaaaagccagactccctttttgatcattttacgcgtgttctcttttttccgatgccgcgccggactctgtttgttttgctcctgacataaaccatccgcaaaccgcaatggcagccagaaccgcccagaaaatgattttccaggccgccgaatggatgacatctgccggaattataccgagttcctcatgggccaacgtataaagagcgagcttcacgcctacccatccgacaatcacaaatgccgccgtttcaaggcccggcctggttttcagtaaggatacgaacattgatgccgcaaaacgcataatgattaaaccgattacgccgccggctaaaataacgagaaactgaccgccgtccaagccgccgatggcaggaagccgtgttcccggaagcgttacggcaagtgcgaccgccgctaaaatggagtcaacggcaaaagcgatgtccgcgagctccactttcaagacagtctgccaaaacccgctttctttctgcgttttctgcccggcgttatctttgaatacataccgcttcagcaaatggctgaccgcaatgtaaaacaggtataaagcgccgacggcctggacctgccaaacattcaccagaaatgaaatggcgaacagcgacccgaaacgcaaaataaatgcgcccgccaatccgtaaaataaagccttcttcctttgtttttcaggaagatgcttcaccatcacagccatcaccagcgcgttatccgccgccaaaatcccttccagcccgattaaaacgagaagaacccatccatactccaataataatgcaaagtccaatccattccctccgtttcttttttctatcatccgagcttataccggcggtttttttacgcaaaaaagacctttgccgatataaggcaaaggtcttgctagacatgaatgattggcatgccaacaaagtcgatggatatgatccatgaattgacgactttgtttccggaatatccggacgctactcccctttgggatttcaagaaatatttgtttatacgctcatgataaagcctgtttcatcatttgtcaacgcttaacttttttaacaaattgagaaattttttctgttttgacccgctgttttcttctcttcaaaaacatccaaagaacgagaagcaacacaatgaatataccgagcggcagcatatattgatcgagaatggaaccgacgcttttccaattttccccgagtttcataccgaggtatacgtaagcaaatgtaatcggcagcatcgctgcatatgtatagagagagaacacccagatattcatcttcgcaatgccgcacggcaaagaaatcagcgtcctgacccccggtataaaacggccgctgaacgctaccaaacctccgtgcttctgaaagaaatcatctgatttctgcagaaattcgggttttatccatatgtactttccatatttcagcaaaaacggccgaccgcccagcctgccgatcccatataagacaagcggacctgaaacaccgccgagcgaaccggcaaacacggctccggcaagcgtcatatccccttttgagacccaatagcccgcaagcggaagaacaatttccgccgggatgaattctatactgagcgccaaaaaaattccggcgtaagataagcttttaaacgcttcaattattgatatgatgaaatcttcgatgatctatcactcccggcttacgtctatattctgaaacttaagaatgattttaacacaaaaccttgaggctgaaatatcttttagacatgcccgttataaatatagtcgtttcagatcggtatagcgggagggaatgacatgcgcaatacaacgtcccgcctgtctcctgaatgctcgtctggcggcggttacatcacttaagatctccggaaagttaccatttgcggtaagcggcgctgaccggaattcagttcatatgggcagtgcgttttgccgggatctttgccatcgccgaatctgtttttatgggagcgggaaattctctcggtcactacatggaaatgcgtgggcatttcccggggaatgattctgtataatttttttgatcaaccattgatgattttcggggacttcagcgatttaaagaacttaccgattcacatgcgatttccttttcagccggctattaccgcatgaggaaatagaatagccgctccatgaacgccgcatcacccataagttgctacacatggaacggacccgtttatccacaataaagacaaaaaggagtttttattcatgcacacgatgtggaagggttcgatcagtttcggcctcgtcaatatcccggtcaagctctttgcggccactgaagataaagatataaaattccgcagtcttcataaagaagaccatgcgccgattaaatacgaaaaaatctgcaccggatgtgaaaagagtctggagcctgatgaaatcgtgaaaggctatgagtatgtaaaagggaaatacgtcattatgacagacgaagacttgaaagacgtaaaacaggaacatgaagaaaaagcggttgagattgttgactttgtccagctgcaggaaatcgatccgatttattttaaccggtcatattatgtcgggccgggagacaacggcacaaaagcctatacacttctgcgggaagcgctgaggacgacgggtaaaatcgggattgcctccattacgatccgctctaaacagcagcttgcgattcttcgcgtgtatgacaactgcatcgtgatggaatccattcattatccggatgaggtcagaaatgccggacatgtgccgggcgttcctgagcagacagccgttaatgaaaaagagctgcagacggcgatcacattaattaatgagctgacaaccgagtttgacccggaacaatacgaagacacatgccggaaagcccttctcgccaaaattaacgataagctcgaacatgaagaagcgggcgtgacacctgctcctgccggcccgcgagaagatgtcattgatcttgtcagcgcgcttcaggcaagcattgaccggacgaagcggccgaatcgcgaacaggctgcaccggcacggacaaaagacacagcgtcagctggcggcggaggcaaaaagcagaagacgaccagacaaaaagccggaacgtcttaatcatggtgctgacgatgcagccgattttgacctctgtaccgcctgaaggcagtgagtggcgctatgaggtaaaatatgacggattccgctgtcttctccgcatagacgaaaacggtgttacattaaccagcagaaacggacagacgctgacgaatcaatttccggaaatcacggcttttgcggcccggtgttttcagcacatgaaagacaggttccccattacgcttgacggagagcttgtctatttaatcaatccgtacagagcggactttgagcatcttcaaatccgcggacgtttaaaacgaaccgaagcaattaaaagcaccgctgatagacggccgtgccgctttctggcatttgatctcctcgttctggaaggcgcgggcaccgtctcattaccgtatgtgaaacggaagcgcgccctttccaatctgcttaaagaagcaaatcttcccgcctgccctcatcacttagcggaagaagcgattcaatacattccggagcacactgactttgacgcgctttgggacaaggtcgtccgccatgacggagaaggtatcgtagccaaaaggacttccagcggatgggcggaaaataaacgctctcccgactggcagaagtataaacatatgaaaacggctcacgtgctattaaccggattcaatccgaagaacgggtatgtgacggcctctgttttgaaagacggcatcgtcgtcccgatcgcttccgtttcccacggcatgcaggcggaagaaaaaaacgccgtcagaaccattatggagacccacggaaaaaaacaaaaaagcggcgagtatacacttgagccttctatctgcatgaccgtgcagtatttaaccatattgcaggacacgctgcgtgaagtatcttttgtgtcctttcagtttgaaatggattggacggaatgcacgtatcagcagcttatcctccgctctaaaacgctgccgccgaagctgcagttcacaagcctggataagatcgtttttaaaaaacgtgaaaaaacgaaagcagatttccttagttatatggtgaaaatgagcgattttctgatgccctttcttaaagatcgggccgtcacggtgatccgttatccgcacggcgcgcctggcgaatctttctttcaaaaaaacaaaccggactacacgccggactttgtcacaagcgtgtttgacgggagccacgagcacatcgtatgcagcagcgtaccgtcacttctatggctggctaatcagctggcgcttgaatttcacgttccgtttcagacagtgcattctgaaaggcccgcagaaatcgtcattgatcttgatcctccgtcaaggaatgattttcctatggcagtggaggctgcgcatgtgctgaaacagctgtttgactcattcagcatgacgtcattcccgaagctctccggaaataaaggcattcagctttacatcccgctttcaccggaagcattcacctatgaagaaacccgtgcgttcacaatgctcatcgccgattattgcgtcaggacgcgcccggatctttttacgacagagcggtttatcaaaaaccgaaacggcaggctctacctagattatttgcagcatgccgaagggaaaaccattatcgccccctattcgacccggggcaacgaattgggaacggttgcggctcccctttattggagcgaagtcaactcctctttaacacctgatgattatacgatcgatacagtagtgaaccgcgtcaggacagagggagatccgttttatgatttttaccggaatccgcaggacggcccgctttcaatcgtgcttgagcaaatcaagagaaagagctgacgcttttggtcagctcttttcagtctgatacgtgcacatcaatttttctttggaaataaataaatagcaggagtaaggaatgtttttgagggtgagctgttttgcagtaaagtataaaatcggaagatgggccgctttcttaaacagcctgtagcagccgctggacggttttatcacatcaaaaccgagtctcgccgctcctttatgaagcattgtaatgccgacgactcccttaatctcgtctttccgtttatgctggttaatataatccgctaaatgaggcatggattgatataccttctgatatagcataatcccccttctgaccgcgctttcaataggctgcagctctttcaggagtttgacattatgaagatgaatcttaactaacacgtcgttttttttaatcctggttccgtcgctcaggatgacatcttttcctttatatctagtcaaacggacgcggaatacattcgattgccgtttatcaatcagcgtcagccgggtaaagaagaaataaagcggatcaagtaagtaccatatagacagcagacagcttctcacatgttcaccttctttatattcaaagcaccctcatattttggcatgaggcatgacacattatgattggtaaataatgatgcagccctgtatcagcttatgcaaaaaccgcttcaggctctactgtccgaaacagaaaaaaacactcttcatgaagaagagtgtctgtatccgctttcttttaacggaaaagcaaatgctggctgtgaattcctgcttttttcagtaaggctatcagctgttcctgttcctcaggcataagtcctgaaaacgctctcgcaattctcaatgaatgaatcggataaattttatccaaatactcgtttcctttatcagttaaatgggcgtaaacagaccgtttgtccttcgggtcttgttctctgaccaaaaacccgtttctttcaagcttgtcgatgacataggtgacattcccgctgacaagcaaaagacgcgacccgatttgctgaagcttttgcggtcctctcgtatagagcagctccaaaacggcaaattcagtcggattaaaaccgtgttctttactatcgcggatgctgtgttcagacacactcttgaaagcccttgcaaaaactttgtacaaattcatcgaacgcatcacttcttcttcgttaaatgataatctcatcatatctaccccgtatttaagatttttataaaaaaataatgtaaacccttacaattcataagagtcgttctttgttttatattctattcgtgccgtttttcagaattccttcttttttatataaaaaaatacccttatacatcatttaatttgtataagggttccgttctttatagggaatgttccgaaaaaaatacgcgtattcctttctcagctccgtaattgtcatggaattaagtatttctttcgtatagactccgatctgcagaagctttttggaataatggtttctctctttatccaatgcattttgaagcaaacgactcatgacggcctcctttgttttccgttattctatgatcagaataacgcttttatatcaaagatgtataaagccattgtaaaacttctgtagattatgatgtttttcggtaaagaccgttctggacggctctgagcagcggaaaagcgtgttccccggcaagctgcatgaacgcctccagcatttcatcgcgtttcatatctaattcaatgatttcttttgccagcgaaaccgctttttctttctccattcctatccttcctcctcattgtatctgtacaataagcataaaacgggggcacagaaccatgcattaaccttgtcaatttttctgccgctttttttctaaaattttctattccgcgtcagaaaacctgacaagcgtcaggttttttctctttttttcttatataatatgagtaaaagacatccaggggtggaaaaatgacgacagacgaacaatcttacaaagataaaaaagtaatctcgatcggcattgtaagcgaattaaccggattgtcagtcagacagatcagatactatgaagaacggaaattaatctacccgcagcgatcatcacggggaacgagaaagtattccttcgcggacgttgagcggctgatggatattgccaacaagcgggaagacggcgtgcagacggctgagattttaaaagacatgcggaaaaaagaacaggctctcaaaaacgacccgcagctccgcaaaaaaatgctggaaggacagcttaatgctcattttaagtataaaaaccgctgatcaaaaaagtccgcctcctgtgagacggactttttttataaagcatgaagaaatgcagttgcaatgccgaaataaattaataaggacaaaatatcgttcagcgtcgtaatcagcggtcctgacgcaatcgccgggtcaatgttcagtttatgaagaataatagggacgatcgttccggccatcgtaccgataatcaacgttgcaagcagcgatgaaccgacgacaaaaccgagcgttaagtctttctgccagacggttgcgacgatcgtaatcgcgatcgcacagacgatgccgatgtagataccggttcttaattcacggaaaatcagtttaaagatggtttttttattcatttcttctttagccagtcctctgatgacgacggcaagtgactgtgtgcctgtattacccgtcgttcccgcgatcatcggcatgaaaaacgcgagggcgactactttttgcaatgtatcttcaaaataattcagaatgcttccggaaatcaatccgataaacaaaagcagaatgagccacggcaaacggcggtacgccgccacgtatgctttcgtatcaaatgtaatcgccttaccggaggctgcgaatttttcgtaatcttcatcggcttctttaatcacgacgtcaataatatcatcgacagtgacaataccgacaagcacattattttcttccacgatgggaatggctaaaaagtcataccgctggatcagccgggcgacttcttcctggtcttggagcaccccggccgagatgacacgcgtaaacatgagatcctgcactttatcgtcaggctcgccgagaattaaatctctgtaagagagcactccgacaagctgcttgctgtcattaatcacgtacaaataatttattgattctgcgatttctgcaaagcttttcagcttcacgaccgcatcttttactgtataatgctgcggaatccagacgaagcggttcgtcatcatccggcccgccgattcttgcggatagttcatcaaaagctgtacggcctttgattcctcagcctccatactggataaaagctgttctttcagttcttcatccatctcttcaagcaatgcggcgagatcgtcgttatccattttattcattgcgagagtggctttcgttttaccgaccttatgcaaaacggcaagctgaaattcccgctccagctctccgatcatgtcggtgatgtcatcaaccgtcatatatgacagatagcgggcccggtgcttttccggcatttctttaaataaaaatgccatgtcatagggctgaagctcatctatcatgtttcggaattcttttatttttccgtcccgcaataaaatgataatgcgtaatatgagttcgtcataggtcatgttttggaccatcgggactcgtacctcctttacggagacgcgccgtccgtcaagggaagtgcggcggtttgtctcctcatcatgtcgtcactggttatctggctgtatatgggtacttcttctgacatactcgaatggggagaatccatactccgcacctccttatcatgctcagtcgtgtacgttttgaggcataaaaaaaaccttccgatatgaaggcgaaaacaagcacggcaaataaacgtgcggggcctccaatcgtagagctttagcactgtatggcataggacagccatccagctgcgttaagaatcaccttatgtcgatgattcctgttgacccattggcgtctttggacatttttgggcagcagcgtatctccatacaggagcctcacctaacgaagttcttatttgaattgacacactgagattacagaaaaaaaaggaatgtgtcaaccttaaatttgtgatttcagcacatgcctataaaataaacggaataaaggcataaagcccttattccggcaaatcgctttcatcgtcttctgaaaggaaatgataggattcatgcagcatgagcgcgtattccccttcttttgtcggatgcggtacatactcagcctcgttgatatactgctcttcccttttcttcatatgacagacctccttctcaattttagattgtccaaaagaagctccgttatcataggaaagaaaaaatcacttgcggaacgggacatgcagctatatttttcggatcgtaaaaaagttcctaagcagccacgggcccggtttgaaaccgagcgttaattgccacgcgccgatcgcctgcagtccgaactcccgaacgagaaccattttttcactcatgctccgcacatcctcaaaccacacttcatgcgttcttccattttcatcagtataccggaagtaaggggaacgctcctgctgggaataacggatcattgattgatgcttcatcgccgtttccatggcgcgctgattggagatggcagatccgatcgttccgggacggtacggaatcacccaatcatacccgtacagcggaacaccgagaatcacttttcttctcggcaccctgctgatggcaaaattgatcgtttgcctgacctctgttaaaggcgccacgggtcccggctcactgccggcgtggtgccagtcgtacgccataatgaacatataatcgacgacggctccgattccgccgtaatcatatcccctcagccacggcactgcatcacttgttttcgccggaaccgatatcgttaacgcgagctgatgctctgaaagccgggtttttaactgccggagaaatcctgtgaagagatccctgtcagcttctctgacccgttcaaaatcgatatttacaccgccgtatccctttcttaccgttaaggagacgatattgttgacgagattcgttcttgccgccggattctgcagcacttgatgggctaattccggactgaatcccccttctgtcagattcgtaatgacggcaagcgggcgcactctgttctgccatgtggtttctattgcggttctgtcgtttaaatcgttcatgatatctccattcgggccgaaatgatattcaaacaaagaaatcgccgaagaatacggcgcaaaatcattaatcagctctctatccgcttcaggcgtccgaatgacataaaattgcagggttcccgcaagatagttagagatatcagggatcttcactttcatacccgtccgcagccggttcggcggaatatccgggtttgcctgcatcagctgcatctgcggcacataagccttacctgcgataacggcatacgtatcattcggctgaaccgtatattcattaagagggattaaaagcgcctgccccggaacgatattcgtttcctcaagcccgttgacgcttctgatgctgtcaacagggtatccgtactttctgctgatggaaaataacgagtctccagactgcactgtatgaacaaacatagatgtcctccgtttccttttgatcaaaagggctcttcttatctttatgaatgatcttccggtccgattccaaactctgttcggagaaaggctgtttacaaatcagacatgatcaactatgatgatgtcattataaaaaactgtataggaaacgcactaggggtgctgttatcggctgagataaaacatgcggcaggcgtgttttgatcccttataacccgatctggataataccagcgtggggaagtgcagattgaccggagcgcagggtttttccccatgcgttttcgttctgctgctgcatattccctcggatatgcagttttttatttttcattaaaaaacgggggaggacaccgcaatatgaaacttacgatcaatcgtctttcgtaaaatcaactctttcatacttacgactatcgataagaaagcaggagatcacaatgaaaaattggaaaatgagagaaattgtcgtcatgtccgtcatcagtgttgtatttgctgtcatttatttagtatcaactcatgcaagcaatatagcggcaggatttttcggccggatgagctacgaaccgatttacggtatctggtttatcgtctcggtgattgccgcgtacattattcaaaaaccgggagcggctctcgtttctgaaatcatcgccgcgtttgtggagtgcttactcggaaatccgtcaggaccgatggtgattctgatcgggatcgcacagggaatcggtgcggaagcaatctttttagcgacacgctggcgggtgtataccctgcccgtgcttcttttatccggtatggggtcttctgtgacaagcttcatttatgacttgttcgtttccggatactctgttttgaatccgggtttattagccgtcatgcttctcatccgtctggtctcaggtgcgcttcttgccggccttctcggcaaagcaatcagtgatgcgctggcttacacaggagtgctgaacggcatggcgctcggaaaacaattcaagaagaaaaagaaacaggtgaaccaagatgcaggcatctgaaccccttctatccgccggccgtcttaccttttcttatgatcaggatgaaaagccgatttttcaaaacgtgtcctttcagctccgcaaaggagagcgggctttattgctcgggccgagcggatgcggcaaaagctcgctcgctctctgtttaaacggtctgtacccggaagcatgcgatggggttcaatcgggaaccgtttctttatacggaacacctctttcacacctgacagaacccgccgccagatctatcggcgtcgtgtttcaagatccggaccagcagttttgcatgctgaccgttgaagatgaaatcgccttcggcctggaaaatttgcaatatacaaaagaagatatggacgcaatcatcgatgacgttttagaaaaattagagatcactcatctgaaaacgcgaacgatcgcttcgctgtcaggcggttcaaaacaaaaagtggcgcttgcctgtatcattgcgatggaaccggaactcattattttggacgaaccgacggcacagcttgatccatattcggcacgtgaattagtgcggctgatcaaagatcttcaagcaaaaaaaggcttcggccttctcgttatcgaacatcagcttgatcactgggcgccgtggatggacaggacgattgtccttgacgaaacgggtcagaaggtgatggacggagagacggatgttatctttgaaacaaggattgaagagctgatacagctcggcattccgattccgcgtgtgatctcattgcaggagcacgtcagcattccttttacattgtgtaaagaaaatctgtttcacgaacctgtaccatctctgcccgaaccccggcccgccgcgctttcggcagaagacgcgctgagcgttcacgaactgtcattctcaagaggagcagaagtcatttttcaggatgtgagcttttccgtaaaaaaaggttcaatcaccgcgattgccggtcctaacggaacaggaaaatccacgctcctttctgccgcggccaagctcatccgtccgctgggcggagacatcaaaatagacggcagaccgattgattcctattctgaaaaagagctgcggcgacagatcggatatgttttccagaatcctgaacaccagtttgtcacagattccgtcattcaagagctgatgttcggttttgaaagcaacagagccgcaaaggagaaagctcttcagctgttaacccgattcggcatgagacgccatgcctcacagcatccgttttctttaagccaaggacaaaaacgcaggctcagcgtcgcgacgatgcttatgcacaatgtgaacgttttgatgcttgatgaaccgactttcggacaggatgccaaaacggcgcgggagtgtatgcaaatgctccgtgagattcaaaaggaaggaacggctgttttgatggtgacacacgatatggaactcgtctcggattatgccgacacgatccttgtgctctgcggcacgaagctggtgtaccgcggaacgcccgactcattgttttctgatcatatcggaatcgcggagcgggcgcatttagctttgcccctgcggtatgaatggatgaaacacgacaggaggcggaaaaatgaacttgcggctggaggctgttaacccgtcaataaaggcggcggctgtattgttatgcgtcattatgctgtcatttatttataatccgtacacccctgctttgttttatatcatcattgcgggaggcgtcctctcggcggggcgtgtgccgctgaaaaaatggctgctgttcacgattccgtttgtcattctggccttcggttctttatggacagccgccgtattcggaaacgtcccgacaaccgggagcaatctgctgtttaaactcgggccgattgccgtcaacagtgataacgcggcgctcgggatttctatcgcgtttcgtattttatgtttttccgctttgtcgatgatgtttctttttacaaccgatccgattctgttcatgctcagtctgattcagcagtgtaagctgccgcccaagcttgcatacggcgttatcgcgggattccggtttctccctcttctgaaagatgaaatcctgatcatccggcaggcgcacagaatcaggggtgcggcgtctgattccgggctgaaaggaaagctctccgccttcaggcgcttcaccattccgctattggcaggcgcaatcagaaaggcggaacgcacggccatcgcgatggaatctaaaggctttactgggagccgaaaccgcacgttttacagaactgttactgtgcgccgcgccgactggtgctttttcctgctcgtgcttctgttattcggcgcaagctggctcatttcattgttgtttgtataaaaacaggccgccggagtgattcggcagcctgttttgttatgtatgttattgatgataattgagagcctgagcgagattggacttgaccgtaatctctgagaaattaatgccgagctgtacggcggtttgagcaatttccggcctgattccggataaagtggacgtgacgccgatcaatttcagcgcttcaattaatttaaaaatctgatgcgccaccatcgtatcgacaaccactacacccgacaggtcaattaacagatgttcaatcagccgttttgcacatgtgctcagcgtattttcaagaatgaatttggcgcgctccgtgtcaatatcgccgacaagcggcagcagcgccgtccgtttgctcagcgtgataaccggcgagcttaactccaaaatcatttctctttgcgcattcagctgcatttttgagttatgctcagcatgatcgacaaacgtgtaaatcgtaaaatcaaatacttgtgcaattaaattctcccatttcttcctttctccctcggcaaacgaagattcatgtttatcggcaaacgcatcataataactgatgtatagtctccggtttctcatgaattcacggaccacatactggacgggagtatccagatgcttctggtctttcgcaagctcaatcacccaccgctcgaattcttctaaaaattctttttccggcatgatatacattttattaatatgccggtaaaattctttatcctgctccgtcagttcttctgtgatgacgggatttgtcaaagaataaatcgaattcggatccgaatcttccatcgtttcgatccactctttcgcaatttgatccacttgttctgaaaaatagctgtataacgcttcatttatcttcatctctcttctcctttcccatttccaattatagcgtcagcgggtcatgaatgaaaatgaaagctgtcaaactatccatttatttgaaattttttagtccgatagattacgccttttttatgaaaatgcttcaaatgactctttccggccggcatgctctgccataaaatagtagcaacacccttgtatccactggcaagcataaaaaaggagggcttttttatgaatggtgaaatgcatttgattccttatgtcacggatgaacagatcatggatgtgaacgagcttcctgaggggattaaagtgattaaggcgccagagttgtgggcaaaagggtttaaaggcaaggatattaaaatcgcggtccttgacacaggctgcgacatcaatcatcctgatttgaaagaccggattgtcggcgggaaaaacttcaccgatgatgacggaggcaaagaagacgtgatttccgattacaacggacacgggacacacgtttccggaacgattgcagccaatgattcaaacggcggaatttcgggtgtcgcgccggaagcaagccttttaatcgttaaagttctcggcgggaaaaacggcagcggcaaatacgaatggatcattaacggcatcaactacgccgttgaacaaaaggcggacattatttccatgtcactcggcgggccaagcgatgtgcctgaactgaaagaagcggtcacaaatgcggtaaaaagcggtgttctggtcgtttgcgcggcaggaaacgaaggcgacggagacgagcgtacagaggaactgtcgtatccggccgcttacaacgaagtgatcgcagtcggatcagtctcaatcgcccgtaaatcgtctgaattttcaaacgctaataaagagattgacctggtggctccgggagaaaatattctctccacccttcccaaccataaatacgggaagctgacgggcacttcaatggccgccccgcatgtgagcggtgcgcttgccttaataaaagggcttgaacaggacgcgtttcagcggacgctttctgaggctgaagtctacgcccagctcgtgcggcggacccttcctttggacatcgccaaaacattggccgggaacggatttctgtatttagacgcgcctgaagtgctgatggaaagagccgaacaggcacagctgctgtctttctgatatttttctcgtataatgattgatcagtttgtcacatcaccaatttttaaattgtgagattttctattgacagtgatctgaataagctgataagataaccaacaaatgatgtaacttttcaaaaaaattgaaatactttctcttatcgagagttgggcgagggattggccttttgaccccaacagcaaccgaccgtaattccattgtgaaatggggcgcgtgatttttgcgccgagacgattgtctcataaggcacggtgctaattccatcagacgtgatctgagagataagagaggcttgcattttgaagttaaagcctctttctctcatgagaaagaggcttttttgttacatctcacttaaaggaggagacttaatgacaacaatcaaaacttcgaacctcggttttccgagaatcggcttgaacagagaatggaaaaaagcacttgaggcttattggaaaggaaacactgataaagaaacgtttcttaaagagcttgacggtttattcttatcagctgtcaaaacacagcttgaccaacatatcgatatcgtgccggtctctgatttcactcattatgatcatgtgcttgataccgccgtcagctttaactggattccggaaagattccgcagcatcacggatcccgttgatacatactttgcgattgcccgcggtgtaaaagacgccgtttccagtgaaatgacgaaatggttcaataccaactaccattacatcgttcctgaatatgacgaaagcattgaattccgtctgacgagaaacaaacagcttgacgactaccgccggatcaaagaagaattcggagcggaaacgaaacctgtcatcgtcggtccgtatacattcgtcacgcttgcgaaaggatacgaagaatcagaagcgaaagcgattcaaaaacgccttgttcctctttatgtgcagctgctgaaagagcttgaagcagaaggcgtcaaatgggttcagattgatgagcctgcccttgtgacagcttcttctgaagatgtccgcgccgcaaaagacctctatgaatctattacaaaagagctttcaggactgaatgtcctcctgcagacatactttgattcagttgatgcatatgaagaactcgtttcttatcccgtacagggaatcggacttgatttcgtgcatgataaaggcagaaaccttgagcaattgaaaaagcacggcttcccgaaagataaagtgctggcagccggtgtggtcgacggccggaacatttggaaaatcgatgtagaagaacgccttgatgcggctttggatatcctcagccacgctgatgttgaggagttatggattcagccttcaagcagccttctgcacgtgccggtggcgaaacaccctgacgagcatcttgaaaaggatttgctgaacggcctgtcatacgctaaagaaaaactggcggaactcggcgtcttaaaagaagggcttctgtccggcaaagcggccgtcagtgagcagatcgaagaatcaaaatcggcacttaaggctttaaaagcattcgcaacaggagcgaactccgctcaaaaagaagagctgaatcagctgacggaaaaagatttctcccgtccggcaagctttgaagaacgattggcgctgcagaatgaatcactcggtcttccccttctgccgacgacgacaatcggaagcttccctcaatctgccgaggtgcggagcgcacggcaaaaatggcggaaaaaagattggacggatgaacagtaccaagcctttattaatgcggaaacgaagcgctgggttgacattcaggaagaaatcggcttagacgtgctcgttcacggagaatttgagcggacggacatggtggaatacttcggtgaaaagctggccggattcgcctttacgaaatatgcatgggtccagtcttacggttcacgctgcgtacgtccgcctgtcattttcggagatgtcgaatttatcgaaccgatgacggtaaaagatacggtctacgcccaatcgctgacggaaaaacatatgaaaggcatgctgacgggacctgtcaccatcttaaactggtcattcccgcgtgtggatatttcaagaaaagaaatcgccttccagatcgggcttgccctcagaaaagaagtaaaagcgcttgaagatgccggtattcagattatccaagtggatgaacccgcgctccgcgaaggactgccgttaaaaacgcaggattgggatgaatatttaacttgggccgcagaagcattccggttaacgacgtcttctgtgcaaaatgagacgcagattcatacgcatatgtgttacagcaactttgaagatatcgtagatacgatcaatgatcttgacgcggatgtcattacaatcgaacacagcagaagccacggaggatttttagagtacctgaaagaacatccttacgtgaaaggcctcggactcggtgtatacgacattcacagcccgcgtgtgccggcaactgaagaaatctatcaaattattgatgacgcgcttgaggtgtgtccgactgaccgcttctgggtaaacccggactgcggactgaaaacaagacagcaggaagaaaccgttgcggcattaaaaaatatggtcgacgccgcgaaacaggcacgaaaaaaacaagctcagcttgtataatgaaaacagccatccgtaaattgcgggtggctgttttttctgggcatgctacttattctgcagcgcttctgccagttcatacaatgaatcatactgcttaatttgatagccccgcccctctttttgcaaataccctttttggcagaattgcgtcagcacatgcaagagatgacggtaagatacacccaaataatcacagaccgttacgtgcttctctttataaacccctttataagccgtctgcaaaataaaatcagcaagccggttttcaagcgggaacgccagactttgtgaatatttcgaagccataagcgttgccttagcacttaaaaacttagccagctcacgcaggaatttcgcatcctgcagcaattgcacgcggcagcggtaaataggcagaacaaaacaaacagtcttcgctgaggcttgaattccttttgtgtaatacacttcatgtaatagttccatctctccgatgtaatcatttttgttgataaaattaattaaagaaactttcccgttttggtgggttacatatattttcgcttttccttcaatcacgtaaaacaggaagtctggcctcctgccctcttgaataatccattcgtcccgctcatattcgcgcacttccataaactcttcagcggggaaagagaataaatgcgcgattgagtgtttttctaactgatgccgctttttctcgcctttataaatttccatcgtccaccccaaaaatatgagatatctcatattgtctttatgtccttacatgataacatgccaattaaaggaggaacgggaatgaaagcatatcgctggatgagtctgcatttttttagtttttttatgacatggggtgtttttctgccctattggacgggatggatggtgcatataaaaggggtttccgtatccgaagccagtttcattatgagtctgggcctggcggcaagagggatttccacattatttttcttcccttatttatcaggaaaattcagcagcaaagccttattaaacggcgccagaatcgggacgcttctcgcacttttatgttatattccggctgattcttttcaaagcctgcttcttgtcacattagtgctgcatgtgttttacccggctttaatgcctgctttagacagcgcttgcggcgtccttgtacagcataacgaattaaaggcttatgggactagccgacagtggggatccgcgggttttgtttcagccggcgtcatcctgtccgtctttacaggtatattcggagatcaagcgattttatgggcactgcttttgggcgccctgatattcgcatccctaagctttatgcatgcgccagctgttctttcaaaacggccggaaacagaccgtgcaagaaaagagggcatgtttgccttattccgcatcaaatatttcggtctggtgctcgcaatcgttatcttactgcaggcggcacatgcatcttactacaattacggttatctctttttgcaggaaatcgatgcgcccgcatatgccatcggaatcatcatcaacatcgccgttatcacggagattatcttctttgcaatcgctgaccgatactttcatcaatttacggcaggctctttgctcgccctggcggcgcttggtgctaccgtacgctggatactcgtatttgcctttccgcatgtcatcattttctgtcttgcgcagacgctgcatgcctgttcattcgcgatgggacactatgcatttatgaaatacttaattaaaaatatttcacccgcgcaaatcccgaaagcccaaggtatatattcagcgcttgctctcagctggagcactgcggtatttactattttcggaggttttttatatgaaattgaaccccggtatgcctttatcggaatgattgtttgtacgataccgtccatgcttctcgcccttttatacagaaaacttgaaatgaaaaagagcgtttttgcaggaaacgcacaagatatatagccatcgctttatagacgatcacatgtcccgctgtcattttgaccgattttgtgaatgctgtgcgatgtattttctctatatttaaagtatttccttcatatatgatgaaattaatgaagggaattcgttcagaaacttggacagaatcagtgaatataatgatacagtactgcttacgctcatttgggggaactttgttcgcaataaaatgattttcagccaactcataaggagggacattgtgtcacagcctaatatgcccaatatcacccctgtcgttacactttccagagacgataccattaaccttcttctttcgtcaattgctatggaagagctgggaatggcacatattctgaatgcggaaggggaaaaaatccaatacgcgctcggaacgattcccggattaacaggacccccgtcaagtcttgcggatattcttaacctgaatgagagcgtccgggatacgcttgacagcttaatgaaacaggagctccttctcggttcaaaattggacagtatctcaaatatccctacattggcgggaccgacgggggccacggggccgacgggggccacgggtgcgggtcttcaagggattgttgcttttaatccgctgatcgcccctacttacacgaccggacaggttgtcttgtataacggcagctcttatgtcgcaaacgtaaacagcccgtcgggaacccctgaaacctcagctgactatacacttttagctgcggcgggaagcaccggcgctactggttcaaccgggcggaccggaattaccggggctactggcggcactggatcaactggaattaccggcgttacaggaccgaccggagttaccggggctaccggcattacagggcctccgggaagcaccggaacaagtctgacagccacttccggctatgcgagcaatacgggcggcggtgttgtcgcagttattaacggcggcacggccatttccttaccgaatgaacaaaacctctcagcggatattaccgctaatgccgcaaatactgtattcaccgttgctccggcaggacggtactatatttcctaccatattaatttaacggccggcctgctagtaagttcgcgcatcttaatcaacggcactccggctgcaagttcgattattgctccggtcgcgtctttggcaaacttcaataactcctttattgtgactttgacagcaggcagcaccattcagctccagctgttcggattattgggtgcggccacattgcttagaggaagtgccggcgcagctttaaacattattcgattatcttaatggaacatgcaaaaaaaggatcaggcgtttgtccgctgatccttttttaattgagacagaagttcttgcgcgggtttaaattgcggattgaatttcacggattttttggcgtaagcgatggccgtcatatcatggtttaatgcagcatggcatttcgccatataataaaaagctctgaaatcggcggcaccttttaaaatgaagtgatcagcgttttctccttcaacctgcgttccggcttcaaatgctttgattgccgctctgtacttttccaaatgatataatacaaggcctttataataatgaagattgctgtaatcaggataaagcttgagcactttttcaatcccttgttcggcttcttcatatcgcttgagctcaagcaatattgtatattttagaaaatacagaagagacggaggcattcgtttctcacttaaaaattgaaatattgagccgttgacaagatgtaatgctttttcatagtcttttattctgtaacattcacttgccagatgatagactagccacggatcaggattttcctctgaaagttcttcatttaatatgctgatattccgtttatgtttttgtttgattttttcttcctgctccaagtagccgtagtgatgaatcacacatgggagcgtgaaaaaagcattgttttcttcctcattgggagccgagatattctcgtgaattctgccttgatacagaaggcctttatgattgcggaacagcctcggctgcatgctttcaaacgcttcgttttcatcgagctgcttccccgtataattgatgattttcaaaagtccccggctcggtaatccgtcatgaagcagagaagttaaaaaacggcccgtctcctgatcgagctcttcatccgcgtcaagcactaaaatccaatccccttcggcatgctgcagggcgtaatttctggcctttgcgaaatcattctcccattcgaaatcaaacactcttgcctgaaagcttttacatatatcttttgtattatcttgtgatccggtgtctgcgatgacgatctcatcagcgatgtcttgtacacttgataaacaacgggagatatatctctcctcgtttttcacaatcatgcaaagagtcagtttacattcagcatttccgctcattttctcacctttcccgattttggagttgttgattgaaccaaggccgtccaggagtgccgttcatcgttatgatgacaggccgcacccatctgacggcaggttcggcagttgattctgcatcccattcctgaagctgcctgacagcccgcttcgtaatgggatgcgcccggaattcgcgcgggctttcacaaatgaattttttcgttcgttccgtcactgtcttcatttcatgaaagtgccgcgcatacatctgcttctgttcttcttccaagctgatcattaaaaacagccggccgcccgtttccatctgccagcggcacaatgcggagaacagcctgatttcttctttgtaatttgaaccccttcttttatccacggtcacagataatatatttaacagcgccatcgtgagacaatgcaaggcttcaaaagatgtctgtttcgcttttgagatgctcggatacggcatatgcttcacccgtctctttttttatgaacgctccccgccttttttcttccaatcgcagtcctcacaatccccgcactcacagcagccaatacggccgtaaaacaggtcgtcacacggatcttccggatcactgggatcgtccggattccacgggtcatcaggatcgcccggatcactcggattacttgggtcgtccggattccacgggtcatcaggatcaccgggatcactcggattacttgggtcgtccggattccacgggtcatcaggatcgcctggatcactcggattacttggatcgtccgggtctatacaggcttcagcatcctgtaagtagataatgtcttcaagcttcgtctgcaaaaggagttgtgatttcatgacggtgcgcaggagccgttcagtgcttctattgattgatgataattcccctaaggagggatcgccggaagcgctgagaaacatttgaatcctttccgcttccgcctgcagaatatgggatagtccgatttcttccatagccacggatgaaagaaggaggttcagggtctcacatctggagagtgtaatgtcgggggtgatgttcggtatgtttggaagagtcatcgatttctccctcttttctcttggtgtcattatgcaaaagtgctatatcgtattcttattccgggagagaagagatcattactgatgttttcgttaataaaatatcccggatatgaaatccgggatattcgttcgtttctttatttcaattcaagtttgacgtctacatttcctcttgttgcttttgaatacggacagaactcgtgagcggcgtgcaccagcttctccgccgtttctttatcaagatcttttgtatcaatgacgagcgttacgccgattttgtaacccccgtcactctcatcttttaaaaggctgacctgtccttcaatttcagaggtcatgtcgattttttgtttttgggcggcgagttcaagcgctcccccgaagcaggcagcatatcctgccgcaaagagctgttcagggtttgtgccggtttctccgtctttttttgcattcggcatgatgatgtcaaaatccagcaccccgtcttcggatttaatatgtcctgctcgtccgccgactgcggtcgcttttgaagtaaataatgccattattatcagcctcctcattgtacttactgtatatattgcccctgctcatatttttaaacatgattgcaataggaaatgggccgtttttcggctacaataggggtaacgttaacaaaaaagagttggtgaaagaatggcagaaaaagattttgaacatatgaaactggagaatcagctttgttttttgctgtacgcaagctcaagggaaatgacgaaacggtacaaaccgctgcttgataagctcaacgtaacttatccccagtatttggcgctgcttttattatgggagcacgaagaactgaatgtgaaacggatgggtgagcttttgcacctggattccggaacgctgacaccgatgctgaaacggatggagcagcacggaatcatcatgagaaagcggtcggctgaagacgagcgatccgtgacgatcaggctcacagatgaaggacgggccttgcagaatacagcggcagatatccccattgccatgctggaacagacgggactgtcaaaagaggaattaaagcaggtaaaacagtcgctttatgaggttttgaaaacgctgcacggcaaaaaataaggatgccccgaatgggcatccttatttttattctgctgccagaagcttcacttcaatatttcccgctgtcgcttttgaatacgggcacacaccgtgcgctttttggataagggcttcaagctcctgtttctcaatgccggatgctttgacctcaagggtaacgccgagtttatatccttggtcgctttcatctttcagcagactgacatgcgcagtgacctctgtttcaatactcagacgctcttttcttgctacgagttgaagagcgctgtcaaagcaggctgaatatcctgcggcaaacagctgttcagggtttgtggcttgttcgagcttttttgctcttggcgttcccggcatggcaacatcaagattcagcaccccgtcagaagacgtgactttcccttcacgtccgcctgcggctgaaacggttgcagtaaataatggttttgtcatataaattcacctctattatattgtgtacaatttaattttacgaaatataatggaaaccgtcaatctttccgcataaaaaaagcttaccctttttgaaggataagcttaaaagattatacccggatttgtccgtttcctttgatgatgatttttgtagatgttaacgccggaagtcccatcggccctctcgcgtgaagcttttgcgtgctgatgccgatctcggctccgtatccgaattcaaaaccgtccgtaaaccgggttgaagcattatgatacacggcggcggcgtcaacggcggtctggaagtaagccgcatgctcggcgttctccgtcagaatggcttctgaatggtttgtgccgtactgctgaatgtggcggaccgcctcctgtacgtcctgcaccgtttttacactgagaataggcgccaggtactccgctccccaatcggcttcttctgcttgtttcgcttgaggctccagtccgcaaatcacctggtctcctcggagctccacccctttttctgtcagctgattcagcagctttcgtccgtgttcttcggcccatttttcatgaatcagaagagattcaatcgcattgcagaccgaaggacgctgtgttttggcgttgatgacgacctcgcttgccataaggggatctgctgactcatctatgtacacgtggcaattgcccgctccggtttctaaaacgggtacggttgattccctgaccacaagatcaattaaatttttaccgccgcgcgggatcaatacatccagcccatcatttaatgtaaagagctgtttggcggtttctttgcttgtatcttcgatgagctgaacggcatcaatcggaagctttgacagcccaagtgcgcgtttcatcacactgacaagcgctatgttgctgtggatggcggaagaacttcctctgagcacaaccgcgtttccggttttcagacagagtgtggccgcgtctacggtaacgttcggtctggcctcatagatcatgcccactactccgaggggcacgcggatcttttcaattgataatccattctcttttttaatggtctccaatgattcaccgacgggatcttcaagaccgattagcagttccacggcgtccgcgatatcgagcaggcgtttttcatcaagcgtcagcctgtcaataatgtcaggtgtcaatcctctgttccgtcccgcttcaatatctttctgattctctgttaaaatcagctgccgttcatttctgagtccgtctgcaatacattggagcgcttcgtttttttcagccgtcgttttcatgaccatttcggcagccgcttcttttgccaaagccgctttttgcaatacttcactcatttgtgttcccccttgtcaaataaattcacccaatcatctctgtgaatcacttccacctgcttcgttcctgaaagctggtcgctccgcttccctttggcttctaaaatttcatcggatgagtactgtgtctgccctttgccgataatgccgccgggccctctgacttccactacggctcctttcggaaaactgccgcagacatcggcgacgccggccgggaggagacttgacccgttatggatcatcgcctgctccgctcccccatcaatgatgatttcccctgatatcggagaatgaaacatgatccattgccgtgtattattcactgaggacaggtctttatcgccgatataagtgccgtcgccttttccgtttaaaatcaccatcagtttttcacgtccggagccggttccgataaacaccttcaccccgagcgacaatgcggtctgggcggcgagaagttttgacttcatgcctccggtgccgacctttgagcctgctgacccggcatatccgagcaattcaggtgtgatgtcattcagatagtcaaaccgctttgcgtccgggttttcattcggattggcatcgtacagcccgttaatgtctgtgagaatcattaattggtctgcatgaatcaaaccgcttacaagcgccgacagcatgtcgttatcaccgaacgtcagctcttcgactgatgtggaatcattctcattaataatcggcacgacgccgcgctccaacagttccattacagtggcataggcatttctgtaccgctctctttttgagaaatcatttcttgttaataaaatttgtgccggcgtcagaccgtatccttttaaatggtccatatattgctgcattaaaagcgtctggccgactgcggcagctgcctgttttccttttatcgtaacgggtcgcgacggatagccgagagcggaaaaacccgctgccaccgcgcctgaggtaatgaggatcacttcatgcccgttttcttttaataaagaaatggcttccgtatgttccttgatttttgcttcatcaatacttccgttactgttggtgagcgagctgctcccgattttcacaacaattctttgttttttcatcgtttctcctccgtggcaatcaatccaaaccggctctcgtcaataaaaaaagcccattccgtcctgaaaaataaggacgaaatgggctttccgtggtaccaccttgtttgaacgcgtttttcacgcgtcccgctttcctgtaacgccaggtatcgcgcctgagttttcccctcaggactccaaggcaggttcggcaggtttcatgcggcaaaatgtttcagcgggccattttgctctctgtcacagaaagttctgcgtactgatcctcttcaacgctcaatgatttttttatattatgcaaagaaaacaggttcttgtcaagacattttcatccataaaaaacagcccgcctccccggcggaccgtcattaattaaatacgatcgttttgtttccgtgaacgatgacacggtcttccagatgccattttacggctcttgccaacacgctccgctcaatcgttctgccgatattcttcagatcctctgcgtgatctctgtgatcgacgcgttcaatatcctgttcaataatcggcccttcgtcaagatcgtccgtcacatagtgagaggtcgcgccgattaatttcactccgcgctcataagcccgtttatacggattagcgccgataaaggccggcagaaatgaatggtggatgttaataatccgattcggatgggcagatacaaaatcagacgtcaaaatctgcatgtagcgggcaagaacgatcacatcaatcttatactgctccagcagctcaagctggcgccgctcaacttcggcgcggatatctttgttagctttcatgtaatggaatggaatattcagcggctcgaccacttctttcgcctcttcatggttgctgatgacgaccgcaatttcggccatcatattgccgctttgccattcccaaatcagttcatgaaggcagtgcagctctttggatacaaagatcgccactcgcttcagctcacttgccagagagaggctccatgtcatgccgaatgtctgggcgattgaggcgaacgcctgctgtaaatcctcttttttctcacgaatgcccttgcagtcgaattcgatcctgagaaaaaaacgtccgccttcagggtcagtcgtatattgatttgattcaataatatttgcgccgtgttcaaacaaaaacgcggaaacagccgatacaattcccggctgatcggggcagctgacaagcaggcgccctttttcctcattaccgcggcggtattctttcagccgctgtgtcatatatgaattcatctgttttaatccctcgtatcttcataattcgtaacttattatagattatactgaaaatttgataaaaatcaatttacgaaagaattttcagccctacggctgcgcacaaaataagcgcaatgaaaaagatgcgcttcgcatccttctgctcgccgtagaaaagaatgccggctagtgcgccgcccgccgtgccgataccggtccagatcgcataggccgtgcccatcgcaatcgtctccatcgcataagaaagcagggaaaaagaagccgcaaatccgacgataatgaaaaaaatccacttgactttcttttctttttgaaattgattcattaaaatgaccccgagcatttcacaaagacccgcggctatcaggctgatccaatgcattacgccttctcctccttcgtctcaggcttatcctgtgtgaccagctttaatccgatgacaccgatcagcaaaacgccgatcagcacgatttttaccggatcggcctgttctttgaaaagcaggatttcactgagcacggtgcccgctgtcccgagtccggtaaagaccgcatataccgttcctacgggcaggctgtccgtcgccttgattaatagataaaaactgatgatgattcccgtaatcgtgccgccccacgtcagtgccgaatcagcatgtttcaggccggtgacccataccacttcaaatacggccgctatgaccactaaaccccatttcatgttcttcatcctttctgtttccgggcaatacaaaaagcccggaatagtcgtctcacatgagattgactctcccgggcttttttccctccgtgtgcatatgcgggatatgtccgcatatgtgttttctctcggaccaggccatgtatgaacatgcggaaccctagaaaacatgtctgttcgtatcatactacatttcgccgaaacgttcaacgtcagatgtgatgtcaaataccgtcagccgcctctcccatttggtaacggtctcaccgggcaccatgccgattttttccgcgacgcggacggaggcagcattttccggatcaatcagcgccgctatgcgtccgtattgctgcgtatgaaaaccgtagtccagacaggcgttcgccgcctctgtcgcatagccgcagccccagcggcagcgggcaaacatatagccgatttccatcaaagtgtttccgcttatcgtctgcggaacgattccgcattgaccgagaaatgcacccgacactttatcctctgcgatccaaagactgacgccgtatcctgcggccaatcgtttgttccaggcaatccattccttcgtttcccgtctgcttttaagagaaggataatatttcatgacctctctgtcggtaaacagcccgtacaaattgtcttcatcgtcatcccgcatagtccgcagacggatacgcccggttgtcaggatggtgccggaagacttatgtttcatcatgcacgccacgtctcctttccctgtaataaattatggacccggcaggaaaagtcctttttcagcataaaaaaaccgcttttaaaaaaagcggtttgacgattaccaaggtttatctgttccgagcgcctcggccagggccttgctgtgttttaagcggttttttcgttctccggcgcgctgaacggccgtattgtgaagcatgatttcttcctcggtttccggcacgatccgcggaacgggcaccgatttcccgtttgaatcgagcgcgacgaatgtcagaaacgacgttgccgcaagctcgcgttcacccgtcatcagatgttctttaatgactttgacaaacacctccatagacgatgtgccgacccatgtgacgtaggattcaagacatacggaatcctgttggccgatcgggcgcaaaaaatccacagaatccattgaggccgtgactgtttcacaccggcagtggcgggccgcggaaattgaagcgatatcatcaatatagctcatcagctttccgccaaacagcgtattgtgattattcgtatcaagcggaaaaaccctgcttgtcttgacaacccttgtttctttgcaaaatcttgattctggcaacttcatattatttaaactcccctttggtgtctggtcgttttgacatttcatctgtaccctattaaacaatactttgatcgttttgtctaaaattttaaatattaagttggttagatattctatcagaaatgtttcattatttatcacatccgggaataataaacgcacattgaataccgataggaggatatcacatggacgtatccatacccaaatccacgcggaaaccggcttgccgcagtgagtttgatgctttgcagacagtcatcttatgccggccggaacacatgaccatcaaggatattattaacggaacgcagaaacatttcaaacaagaaaatattaacatacccgttgccctcaaacagcatagtgagtttattgacattttaagatctcatcagattgaagtcgtcctgctgcctgccgatcccgctttgcctgagcaggtattcacccgggatatcggatttgtcttaggcgagacagcgtttatttcaaacatggcggcttcagtccggcagggagaagaaaaagtgtttcaagacctgcttgacgataagaaaatcccttatacgcgactgaaaaaagcgaacattgaaggcggcgacatcttgatcgcagacggcaccgtttacgccgggctgagcaagcgtacggataaagcggctgtccgggagctgcgggaggcgctgccggagatgactgttgtgccgatccctctcaaggaggatttcttacatttggactgtgtatttaatatgatctcggaaacggaagcgctatactgtaaaaatggcttgcggcagaaagaaattgatcttctcgccgaacgttttgagatgatagaagtgcctgaagaagagcaattcacgctcggcccgaatatcctgtcaatcggcaatcagacaattatcagcctgccgcagcaccgtcatacgaaccgcgagctcagaaaaaggggttatacggtcattgaaaccgagttttccgaaattatcaaatcaggcggttccttccgctgctgcaccttgccgcttgccagaacatcttaaacatttacaaggcagtttccttcaagatacgttaatatagagaagacaagactctaaagggggaaaccgaatggctaagtacataggatacgcgggaacatatacaaaaggcggaagcgaaggcatttattgttttgaacttgatacagaagcgaaaaggctcagccggccgaagctggcagcaaagctcggcaacccgacatacgtcactccgaattctgataacagcatgctgtattccattgaaaaagcagacggaaaaggcggcgtcgcagcctatcagattcatcagaacagcggggaattaacgtttgtaaaccaccagctgattgaaggcccgtctccatgccacgtcagcattgatgataaacatgaatatgtgttaaccgctaattaccacagcggaaaagtgcacgcctttcccgtcaatgaggacggaagtctgcaggagccggctgccgaagccgctcatacgggaacaggtcctcatgaaagacaagagaaaccgcatacccatttcgctggctatacacctgagcataactacattgcagccgtcgatttagggacggatacgctgtatacgtaccaaatgaaaaacggttcgctcacagaggtgaaaactcactctttcgcaccgggttcagggccgcgccacatcgttttccatccggcggaaaaatacgcctatgtcatgacggaaatcagcaatgaagtcatcgcgcttgaatacaacccgaccttaggtgaattcagagagctgcaggtcatttccgctttgcctgaaggctttacggacaaatcgcaaggcagcgcaatccgcatatctaaagacggcagatttctttatgccgccaaccgcggacatgacagcatcgccatctttaagatcaaccaatattccggtgaattgtctcttattgaatgggtgccgacagaaggcaactggccgcgtgatttcgcgtttgacccttccgagacattccttgtcgcgtcaaacgaagaaacgggaaatctggttttgtttgaacgtgatccggaaacaggcaaattgactctgcttcaatccgacattccggttccgtatccggtctgcgtgtcatttctgcatcagatttaatcaaaaagaaagctgactttatattgtcagctttcttttttgtataaatggcaggcgacaaaacgccccgccttcacttcttcaagctcaggcgttatcttaccgcagagctccatcgcttcagggcaccgcgtcctgaatacacagccgctcggcgggttaagggggctcggcagctcccctttcagaataatccgttcacgcttgtcctcaagaagcggatcaggaatcgggattgaggataaaagcgccttcgtataagggtgaagcggttcccggtaaagcgcagcgctttctgtaatttccatcatgcggcccaaatacatcacgccgatccggtcgctgatatgcttgaccattgataaatcgtgggcgataaataaaaatgtcagccctttctctttctgaagcctttttaataggttgacgacctgagcctgtaccgacacatccagcgcggaaatcggctcatccgccacgataaattcgggatgcagagagagcgctctggcaatcccgattctttgcctctgtccgccgctgaattcgtggggataccggctgccgaaatccggatggagcccgacagcttcaagcagttcatccgccatcatcatacgggcttttcttgtattgtaaagattgtggatttccatcggctccataataatttcccttacggtcagacgcggatttaacgaggcgtaagggtcttggaaaatcatctgcagcttgcggaagaagaccgaccgctgttcggccgcggcacggtgtatatccgtcccttcatatgataccgaaccggccgtcgggtcatacagacggagaataactcttccgagcgtcgatttaccgcatcccgattctccgacaagtccgaatgtttcccctcttttaatgtgaaagctgacaccgtcgactgcttttacggctttctttcttcctgcgtcaaaatgcattttcagcccgctgacttcaaggagcggagatgccgtcattttctattcccccttttcgcttatacagcggcgtacggtgcataattctttttcatagatcgttccttccaaggacagcacttcgattgtttttcccgttttcggggagtgcagcattcggccgtctcccagcgccaaaccgacatggtgaatcgcgccttttccttcttcataggcgaaaaacaaaaggtcagccggccggatatcgtttaccgccgcgccgcacccggcttttgcttggtcctttgcatcacggggaagggtatagccgtttgctttaaatatcgaatacataaacccggaacagtcaaacccgaaaccgctcagtcctccccataagtacggaagcccgagaaacatcatgcccgtttcgatgacctcggccgcccgtccttccgtatgccggcactcgtctgcgtcagcttcatttacgaaccgttctccgagaggcgtcacaacccgaaaaaagcctttctcacgtcctgatgccggaagacgcgttaagaaacttacttccaagtccggttcgccgttagtgtgatataaaaaagctgtcggtttggtaatccatacggcgggcgaagatgaaaaaaagccgtcttttgaaagctggcttttttttatccagcccggatatccgcgcgcatccttgtttgagggctggccgggaacggcgacaaaagcccattccccttcctctttgagaatgatcacctcttccccgaaaagcgcttgcgtttggacaaggttgtctgtgcataattgcagccgctcttcatatcccatagacgctaaccattttctgatctgcggcgggttttcaagcatcggcgcatcatacgaacggggagatgacggcatcgtccatacgttggctgccgccgctgtaacggctgctctcatcttttcgcctcctcttgtttcgacaccccggtaatgccgagacccggttcatcgggaatcgtaatctgactgccgctgtatgtgatgccgcctttaatcaaatcatctttcagcataagcggcgcatcaaaatcaaaccttgtcacattccgtttgcccgcggcaaaatgagccgcggcggtgatgccgagcttggtctcaatcatgctgccgaccatgcattccacgccgcacgtttcggccatcgcattgattgtttccgcctgctttatgccgcccgctttcatcagcttaatattgattaaatcggcgcttctcgtctgcagcacgcaaaaggcctgacggggagtaaagacgctctcatccgccataatcggcgtgtctacggcatcggtgacctgcttcagcccggcgatatcgtctttatgaacaggctgctcgaccagctcaatgccgaggccggcgtcttccatctttcggatcgcagtcacggcttctttcggcgtccagccttggttggcgtccaatctcagtttgacgtttccgccgacacgtgatctgatcgcctgaatccgggcaacatcgtccgatatgtcacctatgccgacttttatctttaaaatatgaaatcctttgttcacatagcggtctgcatcccccgccatctcctcaggagaattgacgctgacggtaaaatctgtttccagtgtattccgatagcctccgagaagccggtaaagcggctgtccgtgcatttgcgcccatccgtcatatacagccatatccaccgcggcttttgcgctttgatttctttccaacagccggctgatatcatacaaaacagcttctatgccggaaaggctccgccccaagagagcgggcttcagcacatcgcggacggcgctttcaataccgtccgtgctgtcgcctgtaatgacaaccgtcggcggcgcctcgccccagccggtcagaccgttgtcaaatgtgagcttcacaatgaccgattcagcattgtaaaccgtgcgcaaagcggtcttaaacggctttttcagcggcacggacatccgtcccgtttgaatatctgtaatcctcacgcctgatcactcccttccggaaacccccgattcaatcgttaccgctttggccgccgtatccataaccgcgcgggctccgatcggaacggcgaagctcggtgaacaatggccgattttaaagcctttgagcgcgggcttccctgatttgacaatgtaatcgttcagcacttgctctaaagtaagcgacttttctttatgcttcggttcgcattggtgaaaatcacagaccagtattccggctgcgtctgacagttttccggccatctttaattgattcagcatcctgtcgatttgatacggctcctcatcaatatcctcgataaacagcaatttgtctttcgtatcaatttcaaacggcgtgccgagtgtggacgtaatgagcgacagattgccgcccgcaagctctccctcggcccttccgcctgtcagcacctccagcggagaaatgtcctccgtataggtgaattccgtttctgtaaaaagctgatgatacgacgcttttgtcaggggttcagcatcttcaagcccgacatccgtgctcagcatcgggccgtgaaatgtgacgagccccgtattttgatgaatggcggtatgtaaaaacgtaatatcgctgtatccccagaaaattttcggattgcggcggattaagccgaaatcgatgtcggcggcaatgcggcccgtgccgaatcctccgcacgcgcatatcaccgctttgacattctgatcactaaacatgtcatggagatcattgaggcgcgcccggtcttctcccgccaaatagccgtgacgggtcttcagcgcccggccgagtttcacttgaaggccaagctcattctctaaaaacagcagcgcggtttgcagcgtcccgctctcaggcgggcttgcgggtgcaatcacaccgaccgtgtcgcctttttgcagtgctttcggtttatggttcatgactttttcaatctcctttccggattgaaaagtgaaacacgccgctcctttaacggcaaaagagcggcatatgtttccgctgtaagatcaggacttttccgcccatttcagatcaatgtaaccgacggggtgccggacaatgcccttcacgccgctgttctgcagatgcacctgattgtaaaagtaaatcggaatgatcggagcctcgttcatgagcagcttttccgctttatgcatgagcgcaaaacgttttttggcatcggcttcctgttttgcctgcttgatgcagccgtcgtatgccgcgcttccccagccggtgcggttcatggaattatccgtttggaaagcctcaagaaaactgatcggatctgcgtaatccggtaaaaatgagctttgagagaactggaacttcagtcctttctgctcttctaaaaagacgttccattccatattggcgagcttaacgtctataccgagcacacttttgagcttctgctgaatcgcttccgctattttcttatgctccggttttgtgctgtatgtcaatgtaacggcgggcagcttgtcataatgctcttctgccatgcctttttccagcagttttttggcttctgattcatccggagttagtaaactgccgcccgcttcgcggaaatctttcccgtcaggctgagtaaatcccggggatacaaaggcatgtgccggcttttcactgtttttggtcacataatccgtgatttctttctgatcaatcgctgccgcgaacgcttttctgatcttttcattttgaaacggctccattttaacgttaaaacgatagaaatagagtccggcctgatcccacgtgcggacattttttcctcccatcagctgctcgctcagctctgccggcacaaaggcggtatccaaatcccccgactggaacatctgatagtcggtattccggtcactgaccatcgcccatgtcactttatccagtttcaccgtctttttatcccaatacgtctcgtttttgaccatcgtcatgctgtcgtcatgcttccattccgtcagtttgaacggcccgttgccgacaaaagtttttgcttcagtgaaccatttcgcatcagccttggcgaccttctcattaatcgggaaatacgccggattggacacgacgctcaaaaaataatcctgcggggccgccaatgtgacgacaagcgtttttttatcctttgccgtgactttcacgtcttcttttttgccttttccgctgttaaattcttctccgcctttgatcatatagccgagaaaagcggaagatgcgcccgttttcggatcgagcatccgcttccaggcgtacacgaagtcttccgccgtgacgggatcgccatttgtccattcggcgttatctcggatattgaaggtatatgtcagcttatcagcggacaccttccagctttccgccatggccggttcgggcttattatcttttccgagcctcgtcaatccttccatgatgttattcagcggctgccaggaaacattattaaatccgatcggcggatcaagtgaggtcggctcattttcgttattgagccgcagcaccgtctctcccccctgttcttttgctttgccgggttctgtccccgcctgttcattggctgtacagcccatcagagcaaacgaaacaacagcaatcacaccaatcgcccatctctttttcatttcaatccccctttttcctctgctgcagtcagctgctgcttcagccgctctgcacggtgatcctgaagccagcagctgacgatacggcttttggatttcacggttgttgccgggtataccttttcacagacgatcatcctgtccgggcagcgggcggcaaacgggcagcccggcggcggatcgaataaatcaggcggcgtcccgtcaatcggcgaaagctcactatcttccatatccagccgcggcactgaacgaagcagcccctttgtgtatggatgagccggacggtaaaaaatatcatgcctcgtgccgatttcggcgattttccccgcatacataacggcgactctgtcggcggtctgagcgacgacgccgagatcgtgggtgatcagaataatagacacgcctgtttttctttgaatcttcttaaataattcaaggatttgtgcttgaattgtcacatcaagagccgttgtcggttcatcggcgatcataatttccggctcgcagatcagagccatcgcgatcacgatccgctgccgcatgcccccgcttaattggtgggggtactgcttcaggcgggatttcgagtccgggataccgaccagatccagcatggcgagaacctcggattcagcttgttttcttgtcatggcgcggtgttccaacagcgcttctgagagctgatcccctatggtcaaagtcggattgagcgccgtcatcgggtcctgaaaaatcatagaaatatcgctcccccggattccccgcatttcccgatccgacattcggcaaaggtctttctgtttaaattgtatgcttccggattcaatctttgccgaatgtttcggaagaagacccatcacggcttgtgacgtcacgctttttccgcatcccgattcaccgacgatcgcaaacgtttcacctttatataaatcgaagctgacgcctcttacggcttttacagtgcctccgtatgttgaaaaagtaacatgcagattttgaacggaaagaacttgctgcgccatttttcctacctcctcagtttcgggtctaacgcgtcctgcaagccgtctccaagcacgttaaacgcgtacatcgttaaggaaatgaaaaaagcgggaaaaaacagccgccaccaatggcctgataaaatcgccggcagcccgtcatttgccatgactccccagcttgcaaacggcgcctgaatgccgagtccgagaaaacttaaaaatgattccgcaaaaatcgccgccggcaccgtcagcgtcatttggacaataatggctcccatcgtattcggcagcagatttttcttaatgatccgaaatgttttcgctccaaacgttttcgatgccaatacgtgttcatcatgcttcatcctcagcacctgccctctcacaatccgcgccatgccgacccatcccgtcactgtcagagcgacgataatggaactgagccccggccccatcagcaccattaacaaaatgacaacgagcagataaggcaaaccgtagagaacctcgatgattctcatcatggcgctgtctgtccggccccctttgtagcccgcgacgcctccgtagataacgccgatcaaaaagtcgatcagcgccgccatcacaccgacaaataaagagatcctcgctccgtaccacgttcttgtaaacacgtcccggccaagttcatcggttccgaaccagtgtgaaaaagaaggcggaagattctgctcggcgagcgtctgccttgtcacgctgtgcggtgatatcagcgggccgaacacagccgatagaaacaggcagcataatatcacaagtccggccatcgccaatttgttctttttaagccgccgccacgcatcctgactgtaagacaggctcggacgcttgaccgactcggtttcaccctttctttccgcgcccggctgaaaccagtcatcaggcacttctgtgtgttttaccgtttcttgcgggagattcatcaggatcaccctttcttatgaagttttatgcgcgggtctaacaggccgtatgccaaatcaaccagaaacagcaggacgatcagaatcacactgtaaaatacggtcgttcccatgatgaccgggtaatcgcgctgattgatgctttctacgaaatatttgcccattcccggtatggcaaaaattttctcgatgacgaaactgcccgttaaaatacttgcggcaagcgtcccgagtactgtcacaacaggcataagtgcgtttttcaatgcgtgtttgatcacaattttgacgggagaaagcccctttgcttttgccgtgcggatgtaatcctgagtcagcacttcggccatgcttgatcttgtcagccgcgcgataatggccatgggaccgacggcaagcgcaacagtcggcagaaccatgtgaacgggactcgtccaggtagctgccggaaaccatttcagatgaaccgcaaattgctgaatcagcagcgtagccattataaaattcggaatggaaatcccgagcaccgcaaggctcatggccgcataatcgagaaagccgccgcgcctgagagcggccgttatgccgagcgcgagtccggaaatcacagcgatgatgatcgccgttatcccaagctcgaaggagacgggaaatccgcgttcaagcatggcgtttacactgtctgacggttttttgattgaaggaccgaaatcaaaggtaagaatggattttagatagatggcgtattgagtgataagaggttcgttcagatggtagtaggattcaagatttcgctggaccgcttcgtttgtgccccgctcttcgttaaaaggcgagccgggtatcactttcatcatgacaaatgtcagagtggtgatgacgaggacggtcataatcatggcgataaaacgtttgataaaataccgcagcaatgccgttcacccctttaacagaatgttgttctcatagcgagttctgtcatgacgagcatggcctgataggcttccggcatgtcttttgcctgaaattgaacgattgtcgttcccgggatgatttctgtgcccggcattaaatgggcccattcagcctgtccgtaattggcaaattcaatgcctaatacaggtttttcaggcggagtcagcggtttgaccttatctttatttttgagcgcataggctgttttttccgtcaggagccgtccggctttttgaggggacaggcatttgaccgcggttcttgaaatggtttgtttgacggcggcagtcgtcacattcgggatcagctcctccgcctcttttgcggcgcaatcatctccggcagccatgatgaccgggacatcgtaaaatccggcgagataggcatttaaccccagttcaccgacaggcttatcatttatgtaaaagtggcggacgccgaatatcatgctgtgcgacatgacgcccggcatcgacgctctcgcatgatagccgataaacatcacacctgaatacgattcatcaagcccctgcatcatggaaaacggcttgacatcccccgtaatcagctctgcctcagggtgaagtttttccgcgagcagattattcatctttgagtggctgtcattcacggtcacttccgtgcatccgttattaaacgcttctgcgatgcaccagtttgcttcttcggtcatcagaaccctgccgcgctcataattgtgcatgctggaattgacaaatgtttcatcaggcagtccggaaatcccttccatatccacagatagatacagtttcatgtaatgcctccttttttatttaaaatttcgatattaaattatgaatattctaacaaattatattaaaaaaggatgaaacatgcaatataccattctgccattatgggaaaaaacaaacccttttcaccgggaaaagggtttgctgatagaaaaagttacataccgtttttgtttatagggtgaccccgaaactgtctgaccgcacttctgtattcgcgatcgggaatgacctgatgcctgatcggtccaggagcctgcggcgaaggcttttcatccgcctgcttacggacggcatgcggtttatgcgccagcttatgtcccatgccggtcgcattcatgacaaatgataaacacactaaaagcaagcttaagatgaaagcaataagaaacaaatcgctgtatgtccccatcagcaggtcatgcggcgattgtgtgccgcgcgcgccccgaagcatgccggaagcatctcttttcgtaaaataccctattaaaacaggtgcgcccatataaatgaacagccttaaaaactgaacggccgtcatgcgtttcaccagttccggaagcggtccgcccaacgcggcgcccatcagtccggctgctacgataagccctgtcccggccgccagcatcacgaaaagcgccgcaaatagaataaacggtatatgatgacccgccgtcatccattggaaattcacgaacaccagtataacagagcctgttatgccgagcatgcccggaccgactttatcatatgctaatgcactgataacagcggcgatggccacgcctcccaaaaggctcgcatataagaatatcagttgagtttgtgacatgtgatatgcggtctgaagctccccgtgaaatgcagaaagactgaccgctatggaaatactgcccgcagcgatcatgaaaacacccaaaatcggctttggaatcagcataagtttaatcgaaatcagcgcatgttcgtttctgtactgcataatcagcaggatcagcagaatgacgatgcttcctccaaatcccgccaatgtctgccatgatgaaaagccccatttcggcagatgaataaaagtataggcggtcagcacggctgatccacccgctaacagaaaaccgatgccgtcaaatggagatttttcagtatttttatgagcgtcatcccgcagccacatataactgaaaatgaggccgaaaaaagacagcaggccaaaaatgccgaacagccaatgccaatggccggcgcttgccgccgccgtgcctaaaacggtccccataatgacggacccgtaaaatccgccgattaacacaaataaggcgtaattccggcgttcaatcggaaacgaaagcaccagcatcggaatcataatcatcagcatagtgcccgccgcagctccctgtaaaaaacggcccgcggcgagcggataaatatcatttgtcacagcagcaagcagcgctccgatgacacccgcggccatcgaaatcatatagacaggccgggagccgaatctttttcttaaatacggccccgccggcacgaataaggcaaatgccatattaccgataataatcggatgaaaagagtcaaagttttccccgccgaccgtctgccggacaaggctttggacagccgaaagagcggtattcgacatcagccccggcccgacagccagcacagcaagcagagaaatgatccagtgatgtttttctttcatttgacagctcctttcttaactatttgacaaagtgaaaaagctaacagatttcccccattagcttgacagaattttttatatcttttcatgtgaaggattgaacataatatcccatttattatttcaaatccgatggaaattgtcaatataaagcgccgccgtccgatttcgtctttttcacaatttcccacaatcttttcattattatcccacactttttgtttaagatggagtcagtaataataggcaaatcatgctatgatgaaatagagaaacggagtgaacatgatggataactatcgtgatgaaaatcggacagaccaaaaagaacaggaagtccttttagtaaaagaaaacccgcagccggccggatattccgagccggacgaggacaagaaaaaacgaagcttcggctggttcagaccgcttctcggcggagtgatcggcggagggctcgccctcggcatctatacatttacgccgcttggagaccatcagactcaagatacttccaatccggctcccgctcaggaaacgtcatcggtaaccgccaagcagacatcttttgaatcagacagcggcaaatcggcaaacagctcatcggcaaattcaagcagcatttcgaatatggtggaagacatttcaccggcgatcgtcggaatcaccaatctgcagaagcagcaaagcagttccgatttattcggattcggatcaagctcggattcaaactctaatgcatcgggtgatgatgcggaaacgggatcgggttcaggcgttatttttaagaaagcaaacggcaaagcgtatatcattacgaataaccacgtggtcgaaggcgcctcttcccttaaagtgtcattatatgacggcaccgatgtaacagctaaactcgtcggccgtgattcgctgacggacttggccgtattagaaatcagtgataaacacgtaacaaaaacggcaagcttcggcagttcatccgctctcagaacgggtgaatccgtcatcgccatcggtgatccgctcggaaaagacctttcccgcaccgtcacacagggcatcgtgagcggcttaaacagaaccgtctcgatctctacgtcagccggtgagtcaagcatcaacgtcatccaaaccgatgccgccatcaatcccggaaacagcggcggaccgctcttgaatacagaaggcaaaatcatcggcatcaacagcatgaaaatcagtgaaaatgatgtagaaggcatcggctttgcgattccgagcaacgatgtaaaaccgattgccgaagagcttctcacgaaaggacaggtggagcgcccttatatcggcgtgagcatgatcgacttggaacaagtgccgcaaaactatcaggaaggcacactcggcctcttcggcaaacagctgaataaaggcgtttatattcgtgaagtggcgcagggatcacctgcagccaaagccggattaaaagcagaagacatcattatcagcttaaaagggaaagaaactgacacgggcagcgaacttcgcaatattctctacaaaaatacgaaagtcggcagcaccgttgacgtgaaaattatcagaaatggcaaggaaatgacgaaaaaaatgaaactgactcaaaaagaagaaacatcttcttaacaaaaatccaaggcagccgccttggattttttatatacagatgaaactttaggcctggatcagccgtatgactcagtgtacaaaggaggatacatacacatgaaacaaaccggacttttgctggtcgttaccggcctgatcttgctgcagctgagcattcagcttcctcagcaaaacgctgcttggggaatgacgcttggtgcaagcattttactgaaatttttcgtgaaccggactgatcatgcgctctctgcacacccagaccggccgcagatgaataaaaaaagccgcgggacattctgtcatcccgcggcttttattttacataaaagcaccctgtccgctggccggacagggtgtttgttaagacatatgctggtcccgataaatcttttcgtttttcataccgtacgctttttgcacgatatagagcggacgatcttttgcttcgtcataaattcttccgatatattcgccgatcattccgagcattaatagaacgatgccgctgaataacagctgtatcacaatcagagaggaccagcccgtaatggtgctgtctgtaaaaagcttcatgtataaaacgataaacatatagagaaaacccgctccggacatgagcattcccgcatagcttgccgccttgagcggtttatgagagaacgttgtgatcccgtccatggaaagcttcagcatttttttaagcgggtatttcgtttcccccgcaagccgctcatctcgttcatattctacagcagtctgcttaaagccgacccagctgacgagtcctctgacaaaaggatttttttcttttaatcttttcatctcatcacagacttttctgtccagcaggcggaaatccccggtgtcgagcggaatatcaatatcagtcacgctccgcagcagccggtaaaacagagaagccgtctgtttcttgaaaaaggtttctccctttcgtttcgttctgacggcgtacaccacatcgtagccttctttccactgctcaatcatatcaaggattaattcaggagggtcctgcaaatcggcgtcaatgacggcgattgcattcccctctgcataatccatacccgctgtgatcgcgatctgatgtccgaagtttctggaaaaatcaataattttcactctcggatcaatcagactttgctctcttaaaatctcaatactgcggtctttgctcccatcattgacaaagatcaattcataatgctcttttgtttgatccatgacttctttcaggcgctgataggttgtctgaatgacgagttcctcgttataaaccgggacgactattgaatattgaatatgtctgctcatgttttttcctcctattcatcagattgaagttcgtatagtgaagctgactgattcattccgcccggcccgccgctcattcggctgtttttacccgcggccttgctgctttttgtatcagctgcatcatgatttttcgttttctgatctgtgcttgattgccatttgtatgaagatactttctttccggttttctcaacccattcaacaatatcgttgtttccgcctttgcccattccggatgttaagaagtattttactttcccttcttttacgagctttttaaattgagtcagcgtaatggccgggtcagacccgctgaatccgccgatcgccatgaccgcttttttcgtttttataatgtaaggcgccgctgtgttggaatcggttgcagcaaatagataatccgctccggcgttatgtttctctaaatagttgatcagttttgtattgacagatgcgttatccattcccatgccttttccgcctgctgacgcaagctgagggcctgtttcaggcaatgagctgttgcctccgtacagaagcggtgtgctcgcccaataaatcggcatcaccatcaagacgagaagggctgcaagtgaaacatagtaactgagcggtttttggcgctgtttgaatacgaacagggcgattgccgccactgcaccgagaacgcctgctccgatgctccagcctgcgccgatttgatcattgtagtttttaaggataaacagctcaaatccggtagtcacaagaatagcggccggcaatagccaagttttccatcccgcctgcttgcggtacagatgaacgagggcgacccatcccgcaccggtaagagcagcaatcggaggcgccagcataatgagataataatggtggaaaaattccgccacactgaagaatccggcaatcggcacaagccacgctgcccaaaagatcgtttccttctgttctgctgataatcttcttctttctctcgccccggcgatcaataaaccggccaatccaaaaatcgcaaacggcaggagccagctgatctgatcagataattcttgttggaagagtctcagcggaccgggtgttcccgtaccgaacattcctgaccctgactgcattttcgagccggtgcctgtaccgctttttcctccgccaggaccgcctttgccgccgtctccgccgcttggagggcctccttgaccgccgcttggcatttgtccgttagatggaggtgccgtcatactgccggtttgtgatttgtctccgcttgctgactggccggccggtttttgcatttgtgaagaaccgccggaagaagacatccctttcgatgcgtttccgtcgggcccgccctggccgccgccggaactttgccccgtcagccgctgaatcccgttatatccgaaagccaattccaatacggagtttgtctggctgcttccgacatatggccttttgccggcaggaatattgtcaacaatgagcggccatgacaatgaaacggctgctaatacggccagcgcgcttaccagtgaaatgatttttttcttaatcgcggtatttgccgccatcatatagaacagcaagaaggccggtaagatcatataagcctgaagcatttttgtgttaaagcctactccgacgacaaaaaatgccgccaaaagccagatcagttttccttttcgaatcgctttaaagagaagccatgtggcgaacaagaggaaaaagaccagtaaagcatcgacattgtttgtgcgcgctacggctacagcaatcggtgtacacgccatgacaaacgaagcgatgcgcgccgccgtttttccgaacgtcggctttattaataagtacatgaatagaactgaacctacccccgccaatgcctgaggcaggatgacactccacccgtgcataccgaatatcagcgcgctgatcgtttgaatctggtatgtaacaggcggtttatctaccgtgataaatccggctgcgtcaaatgaagcgtaaaagaaattatgaaagctttgaagcatactcgttaccgctgcggtgtaataaggattcaccgtatcgtcattccagatgttgtacatattcaagaatgcggaagcgagtaaaataaggattaagactgcgtctatctcgcgttttttcattttcacctgtgttttcactccttttgtttaactttgaacaagtgtaacaaccaaatgtgaaaaatttattaataaacaaagacatttattttgccgtttacaaataggtaaaaagaatgacaaaacgggtaaaaaagcaaaaaaaaagatgcccccgtcaagccggaaggcatctttcattacttctgatttactgaatcggtttcagccgcgcttctatttcagaacggcggtgttcgagataaggcgggagcgcaaccgttttgcctagctcttcaggtttttcatcaaccataaatcccggaccgtccgttgacaattcaaacagaattccgttcggttcccggaagtacagcgctttgaaataataacgctctacaatgcctgagttgctgaaaccttctttcgtaatgatgcggtgccataaagcaagctcctcctcattctgaacacggaaggccacatggtgcacgctgccttttccaggacgctcgcgcggaagatcgtttctttcaatgagatggacttctgtacgcgcgccaccgtttccggattcgagcaccgtaaccgcgccccggtcttcatgtgtttctttcccgatttcagtgaagcccagcacatcggttaacacacgcagcgtcggttctgcatacgggacggtcaattcaacgggcccaagaccgcggaaagaatattcttccggtatgccgctttgcttcaccgcttcaccgatgtcttttcctttttcgtcagctgtcagcacaagccgctgtccttcatgatcctgaaaagcgagtgtgtccctgcccgctattttcacgatctcaccgtgagagacctgatgctcttcaaatcgttttttccaatattgaagcgcttgtgcatccggaacacgcaggccgattgaagaaatactgtttgtccccgcatggaacggcgcgatccgcggaatctcgaaaaacgtcaattccgatcccggattggctgattcatcaccgtaaaataagtgatacatcgtcggttcatcctggtttaccgattttttcacaagcttcagccccaggatatttcgataaaaatctaaatttttctgcgcatcagccgtcaatgctgatacatggtgtattccattaactttcattatgttatcctccagtcaattatctcgatttcgagatattttatatatacaatttatgttatccggatcgtaaagtcaacccatctgcttcacagacggtctgcagactgccgctctcaaaataacgaacttttgatattaaaaaaccattaatgttcgcttttaaaacagtattttttccttctcaaaagcataaacctttatcttttaggcaaaacaccaaaatcagaaaatttattttattcgtgtttcagcaattagggtttacaatatggaaaatagttttttcagcataacgattttacatctggagggaaaggatatgcagattgaagagaatggacttaaaaaagagatcggccttaccatcgccctctcacttgttatcggcaccatcatcggttccggcgtatttatgaaaccaggcgccgtgcttgcctactccggtgatgcgaaaaccgcgcttatcgcgtggctgttaggaggcattttgacgcttgccggcggcttgaccgttgcggaaatcggcactcagattccgaaaacgggcggactttatacatatctggaagaagtgtacggcgaattttggggctttttgtgcggatgggttcaaattatcatttacggccccgccattatcggagcaatcggcttgtatttcggctctttgatggcgcacttgttcaattgggattccggctggtctaaattaatcgggatttcagccgttttatttttaagcatcattaacattatcggaacgaaatatggcggcatcgtacagggaattacgactgtcggcaaattgattccgattatctgcatgatcgtgttcggcctttggaaaggcgatcagcatattttcacagccgtcacaagcagcatgtcggaaatgaatttcggcgccgccatactggccaccttgtttgcttatgacggatggattctgcttgcggcactcggcggcgaaatgaaaaatccggaaaagctgctcccaagagcgatgacgggcggactcttggtcgtcaccgccatttatcttttcattaactttgcgctgctgcacattcttcctgcgaccgacatcgtcaaactcggtgaaaatgcgaccggcaccgctgccggaatgctgtttggcgacatcgggggaaaattgatcagcgtcggaatcatcgtcagcatcttcggctgtttaaacggaaagattctcgcttttccgcgtgtctcgtttgcgatggcggaacggaaacagctgccgtttgccggacagatttcgcgggtgcatccgacattccgcaccccgtggattgccgtgtcatttcagatcgcgctggccattattttcatgatcgccagcaatcccgataagctgtctgagatctctattttcatgatttatattttttacgtcatggcttttttcgccgtgtttatcctcagaaaaaaaagcggcggaaaaccgcgcgcctacagcgtgcctttgtatccgatcattcctgttttggccatcgcgggttcactgtttgtgctgatcagcacgatcattacagatacactgagctgcgcgctgtccctcttgatcggcctcgccgggctgccgctttatttttggctgaaaaacggcagaaaaaactgacaaaaacggttccttttacgggagccgttttttttctggcaaaatcacgtgcaaaagttgacagcaaattcacatcttttgttatactttttaagcaagatgtctgaattcgaagtatgttacgtttttttggcgaagtgggtaacataagaaaaacaggatgagacacgtttttacgaaaaaatcaagaggcgtttttttcgactttatctgttttttttcgacaaaaggctatataataatttgatgtgtgcattgtctcattcaaacaatggagggtttttaatgataaaaagaaaaaaagataagttctcactccttttaacagaaatcgcaaaaaacatagacgaaaccgcagaatactttgtcaactttaaagtgacgaaccagacgactttaaaggaatttgccgatacgttaaaagagtttgaaacaaaaggagataatcatgttcatgtcatgattaaagagctgaacaaagcttttatcactcccattgaacgtgaagacatccttgagctgacaaacagcctcgatgacgtgcttgacggaatcgaacatttttcagcaatgatggagattttctcgatcacttcttcagatgagcatatcgataagttcagcggatacatcagagagtgcgcgaaggaaattttaatcacgattgagctgcttgcagaaaaccgattgaaggacattcaccctcacgccattaaaattaaggaatacgagcacagctgtgataacctgcaccgtaaatcattaaaaaatctgttcggcacagaaaccgatccgattaaagtgattcagtaccgcgagatttacgaaacgcttgaggaaattgccgactcttgccaaagcgttgccaataaccttgaaaccattattatgaaaaacgcgtaacgagggttataatggatactctattacttttaacgatattaattgtcatatgcgctttggtatttgacttcattaacggatttcacgataccgcaaacgcaatcgccacctcagtttcgacaaaagcgctgaagccgcggcacgcaatcgtcatggccgccatcatgaactttctcggagcgatgacatttaccggtgtggcgaaaaccattacgaaggacattgtgaatccttatacattagacaacgggtcagttgtcattctggcggctctactcgccgcaatcgcctggaacttgatcacatggtatttcggcattccgagcagctcttcacatgcgattatcggagcgatcgccggagcggccattgcagcgtcaggttttgcgacgcttaattataaagggttcattaagattatcgaagcacttattttatcgccgattatcgcctttgttctcggctttatcgtatattcgatcgtgaagctgatttttaaagacagcaatctggcgaaaacaaataaacgcttccgcagagtgcagattttgacggctgccattcaatcctatacacacggaacaaacgacgcgcaaaaagcgatgggtatcattacgatggcgcttatgacggccaatttacataaaagtgatgccattcctttttgggtgcagctctcttgcgccctggcaatgggtctcggcacatccatcggcggctggaaaatcattaaaaccgtcggcggaaaaattatgaaaatccgtccggtaaacggcgtatctgccgacttaaccggcgcagccattattttcggggccacgtttattcatctccctgtcagcacgacgcacgtcatttcgtcttccattctcggtgtgggcgcttcccaccgcgtaaaaggcgtaaactggggaacggctaaacggatgcttattacatgggtcatcaccctgccgattgcaggtacactcggcgccatcgcctttttcatcttagatctctttttctgatgacatccgcttctttacagaagcggttttttttgtgacaggaaaatgatgtcatgacatagaatgaacatagcagaccatttttcgaattgtgagggatgctcatgcttttgttttttcagatcatggtgtggacgatggcggccgcactcattttatatgtgtacgcatcctggcggtatgaagcaaaggtaaaagaaaaaatgtttgccatccgtaaaacgtggtatttactatttgtagtaggcgccatggtctattggacatatgatcccgaatcgctctttgccgcatggagacaatatttgattgttgccgtctgctttgcccttattgatgcgtttatctttttgagcgcgtatatcaaaaagctcgccggcaatgaattagagacggatacgcgggaaattttagaagaaaataacgaaatgcttcactcctatcttgaaaaactgaaaacctatcaatatctgttgaaaaatgaaccgatccatgtatattatggaagtacagaagcttatgcggaaggcatcagcagactgctggccgcttatggagaaaaaatgaatgtcacggcttccttgtgcgactattccgcacaatcggataaggaccgcttgacggagcatatgcctgatgcggcggacgttcagtcccgtcttaaccgtaaagacgtctactatgatcaaaaaggcaggcttgtgcttattccgtttacagtccaggaccgccattacgtgatcaaactcacgtcggaaaacctgttgacggaattcgattatttgcttttcacatcgctaacgagcatttatgatttaatgctgccaatagaagaggaaggtgacggttaaatggagcaggcatttcaaaacgggcagccggaacaaagagcgaaaccgttcaaaatgtttaaaaaacgttcaatgacaagtatcgcaagttaccaggtcagccctcataccgccagaattttcaaagaaaacgagcggctgattgacaagtataaacaaaaaaaagcttgattacactaaggacaggagacacggctcttgtccttattccttttttccatatctttcatataataaaaccaacaaagagatgcgacaggtgatgatgtgaagaaaattgtcagacgcgtaaagtttgtggattacggacgcttcgggctttccgcttattcgctgaggatgcgggcgaggaatctcgggttattgaaccggttaaaaaagaaaaaaggctgaatcccgcaatgtgaacgggactcagctttttttgttaaagctgcatcagaattttcgcttttacagcgggaccgtagacgccgtcagacgtcagtccgtttacagattggaagcgggccacggcatctgccgttttcggaccgtagataccgtcaatgccgttattgacagctcctttttcaggatagaaataaagcgcggcgagcgcgttctgcacctggtataccttttcaccggacgtgtacggctctgtcagcttgatcacctcgtccggaagagaatacagtgcttcaaccggcgggctgacgatcagcacttgtccgactttaatcaagttcgggtcagcgatgttattccatttctgcagatcggccacgctgacgccgaatttccgcgcgatcgccgacagtgtatctcctttttggacggtatacgtctgtctttcctcagaaccgattcccgctttaaactcatcccatgtatccagcagtcttctcggacaaagctttcctgaccaatgcttgtgcgcaacgacattcgcaagcgggatgccgtgcgacgtcattaatgtgcggatgagccattgggcgtttgccacggcctgtgaaaagttgccgtctgcgttttcacaaatttcaataccgatggatttacggttgccgtccccgtttccgtcaccggcatgccagccgttttcgttcagcggaagatgctgataaatttccgtatcatcgactgtgaaatgccagcttgtcggtgtatcgggatttttcacatagcttgcgtgacttttggcgttagctccgactgcggtattggctgtattgtgcaccgtaatgtaaatcggtgtcattgcatagcctgggcggttattgtttcctgccgggataaaatcctgtgtgatttttaccatattctcatctctcctatttcgataaattgtttatttttaataaagcctgctgttttttcccttttgctgtaacataattgtttttaaaccaggcggcggcagtcgttatgattgtaaaaacggccgacccggcggcatacagcgtatctgcaagctggctgacctggtcctcctgaatattcagcggcgatttgccgaacatcagcaaagtttgattcaataaagcaagcaaaagaagcaccgtcctgacgaccgtgcctttgtccgcgaatttcatatcggtttcccccttacttttgcagcagattgtacatgatggcgattgctccgccaatgacgcccgtgcagattgctgtcacgatcgctcctgtaatggtccgcttaatccatgttgtgttttcgtcaattttgttcagtttttcattcagcgtcatgatttgctgatcctgccggtctgatacccgctctaatgcggctacccgctgttcaagcaccttttgttcacctttgatgtctgcgaattctttttgcaccgcttgttcatccagaagcacttccgctccctcctcttacattgttctcacctcccttcggaagcttcattcttaagaaaatgccgtgcctttgacagaaaggctcccgccggaaatgctcttgatttccatgacgatttccttaaagccggcaatatcaaatgaccacacttcttctgtgcctgacgtaccggcggctgatgtcccgtcatcagacctgattcctctgatcggcacattttttcccgagatggatctcccccaaaacgcgacatggcccgactcagccgtaccggtgatttcgacgagaagttttttccaagcgcctgctgagaagatgcttccctcgcccgcctctgctgcattttcatgaaaaatcacgtctgtatatgaaaacgccatatcaccgcccgtaccgacagattggtataaaacaaattcggactgcttttgatttccattttcaaaacggaaccggtaatatctttttgtcaggctgacccaccccgaagcggtcagcactccgccttttactgcgacaaaatgtgaagctgtccacgaattgttatcctcgctctcttcgataaaaagagttccgctgcggtccgaataagcccacccctgtgctctgtctattaagacggctcctaaacggtcttgtccgaattggctgtagacttcaatcgcttctagcggcgtattggtaagaagctctgccattccggacaaatcagcaaccggtgtgacataatcgtttttgttaccgcgataagcttttacggcgccgggcctgccaagttgatcggcgggaaattcaaatgaatgctttttcatcggccgtcctcctgttctcatttattaaaaatgacaaataaaaaaagccgtttggcttatgacacagcatttttatagttttcgtatgtttcacccgttatttcttgaaattcctcaggcgtgatatacttcgcggccaccccttcagccagatcttcggcagagcagtcatcatagcccatagcctgttttaccatttctgttgaggcccactcataaaacaaggcgtaaacccaaaagttaagttttttcatttttttcattctccttttacgtttaagagttccagttttaaagacgctaattgcctgccgagtgactgctgcgcttgttcggctgcttttctggccaatttctcattcgccagctgtccgccgaggcctgcaagctggtttgaatcgggagccgtatctttttttaagctctctttatatgcttcgtcagcggtttccacccattcttgtttctcttcatcaaaaaatgggcgccacatgccttcgccgtttatttccggcggaaagcccgcagcgttaggcggcatcacataatctcctgtctcagaatccggataaagctcaaccggagtgcctgtataaatgttgtcattgtcatacggaaatattaatttcatattctcgctcctttacgtgagtgccaaaacaaggtcaatataatagccgttcacgttattttctatattggccataattcccgtcagcttcatatctccattagaatagataataaatttgctgtaaccggtggtgccgctggctgcaaccatcgttacaacgcctttggccggcgcacaagaggatggcacactcccgaataccacttctctgtccgtaagaacgtgtccgttcaggtgaagggtgtttcccactttacggtattgaagcggcctgtctcctgatttagcgccatttttataaggaacatttatccaaggtacattctcagtatcaagttcagtaacgaggcgacgccagccctgccagcccaagttcaaatccaaatagttcgtgaacatattatttttataatcgacggcaatgacatacccaaacgttcctttcccctcactgtcaagagaggtaaaatgaaacatgccgcgggttgaagcgttgctcggactgtttgccgctttgccggttgaataaaaggtgccgaacgccctgccgtttttaacgattttttcaagaaagttatcatcatcaccaattgtcagaagatagccgccgttatcgtttgttattttcgaaagctgtgcgccgttccacatatctttatccgcctgtgtgacatgaatgtcttttttattggcgtgagcctctacttttgcttgagagcctgaatctgtttcttgttggctccattccgaccatacgcctttagtgctgaaacttcggacgtatatgggatttccggcggtcactgtgtctataaacatttggacaaaagtcggtgatgctccgcgggttctttgcatgacaattaattgtccgtattccgcaggcttattttctgtatgctgaactgatatatagtagatgccggacgtttttatattgtctaagtttgtttctgttaccgttttagcattcccgtcattgtcagtcagattgaataactgccctgcattccatttgtctttgtcagacttggttacatgaagatctgttttgtcggcatgctcatttacttttgcttgtgctccggcagctgtttcaaatggcatccattccgtccagatgccgtttttcagcgtttttctccaaaatcccccgtcatctgagaaagcggccgcctctccgttattctttgaagaataaaggtatataccctctgacggtttaggcggggtatttattccggttgcagctgctgagaaagtaaaggtcttattctggctggcagcggtctgatgaaaatcctgtccgtcagagatattaataaaagcggagccatcatcttttgtgattttagacaattgcccgttattccacttctggcgctcttctttcgtcacatgccggtccagatcttgattgtgccggtcaaaatctttctttgctgcctgctggacattgtccacgtttccgaggccgatttgcgcctttgtcgttttgtgcgggttgttcatgtcgtttttatgggccgccagatccgtgtgggcgttttttatgcctttttcccagcggttgacgtcatcttcattaatcggatcgtccggaagccagtctgttttttcttcgtaagccatcgttacaccacctcaaaggtaaatcttaaatcaagcgttctgttattgctgagatctaaatttgtttttcgttctgtaatgacgcttcctgtttcgtcaagcatctgcacggtttcaatgtgtttgacgtcttcttccctgcgtgtgagaacggtgactgcggcatcttttacggaaatgtccgcaatcggagtttctttgccgtttaacagcacttttgtgatcctgtttttcagatcggctgcggcacgctgtctgtaagcggctgatatcatggtaagaccacctcgttattgttgagtgtgacggaataaccgaccttcagttcactgacttttcggtatctccgattgttgagaatgacccggtctttgatttccagtgtttcgtttaatgcggctctcagtgtatacgccaaatgagcgggtttgattttttcaagcgtttcaatcagctcgttcatgtgctgcaggtcatcaagcccgatatcggcataaaaacgatactgccccggaaacatccgaacataagctgacggatgttttaaaaaacggtttagcgcctgctcgatcgcttgatgtgtgatgggcggaatattcgacatcttcgagatcagcctgagccgtctcatatcctccgtgtcacctgattcccgcggtatttttaatattttttcccagcggtcaagcccccatgtcgccgtcgtgataaagagctgatccgtcaaatcgaaaatatcgttattctgccgctcaaactcaggagcttccgccataagcagttgtgccatctcttttaatcgggttaaaaacggcgggaggtacgccgtcatctcatcgagtctgctcaaggattttcacctctttgagtttaggaatttccacgtcactgagcacgaggttttctgccgcaccgttcattttaatatcggcgtagtcactgacggatgccgagttataaacgatgttgttaatttgtgataaacggacggtgttttcttcaaaggccattttcttgaataaattcagtacgcctttttcaatctccgcttttacgtcatcgatcgagctgttcagctcaggcagcacggaagcggagatttcgatttccttccatactgcgctttccaccgttactgccgctccgatcggcgcctgtccttctccctgcccttcgtccggatcaatataatcctttacttttttgatcagaatatctgatgccggttccaaattcgcatttgtgatgacaactttcaccgttccgtctccgttccaaagcgggaagatttttgccctgccgacgccgtcaatctcttcggcccattgtttataatgctgtttatttgcgctgactgcctcccggcggacacgggtaaaatagcgcgcccttaagctgttgtcatcttcttcctcacggccgggaattaatatatcgcgcatgactgctttctcaagcccgggtatcgtatcaagcggcagcaggttctgccccgaaatgccggcattgcccgcttcaccggctgtttcacattcaagcgttccatccccgtatattgaaaatacaggttatcaacgaagaaacgggagcctggcggaatggtgatgcccgctgtgaattctccggctctgaccgctttagtggcaggtgttcgttcaattcccgcctcagcagcacgcctgtccagaaattcaccctgagccgtatcggaaaacacgagctccagcacggtatccagccaaatataagactttgcgagctcagcggccgcaggcgcgagcgcattgtaaatgacgctgccttctctcgtatcaatatccgccgtaacgcgcgccagcattctgtccataatgtcgtcaaacgtctgagcttcaaacatcctcacccagcacctcctctatctcaagcatgccctcatcagtttcaacggtaaaagagacgatgaaggcatcatcttttttctcaatctcaaaattggtaacggccaaaatacggtcatcatacagcaaggcttcttctatcagtcttggaatctccatttttttataagcatccgtcgtgttctgatctgaaagcacttcctgaagttcgtttccgatatcatggctgaaaaccgaatatgaataccgttctgtgtgaagagcgatatagacgaattgtctgattgcgtccagtccgtttatcagttcattggtaatccggttgttttcaaagtcaattcggtaggtttgtgaagtctcaacagcctcactcgcatcctccaaatcttcaaattcgatttccggtgtcagggccattgcacccgctccttttagatttgttcatgtaaaaaagccctcttcggcagatgaagcggctttaataggctgatattcccgtatatctccgtccggatgccggttaaattttgtccagtacaaagaaagactgtcctcctgttaaagcggcggtcatcacccgatctcccgcctggagctgatcatcttctccggatctcagccgcttcggcacaatgagtgcatcagacggaatcaaaagtttgtcgtgatctttcagtttcagctcgagcggcgaaacggaggtcacttcggccggcatcagctccaccggcgcttcagcgtcaaccgctccgacggctaaatgtttaatggcatcacttaatctcatcaggctgtcccctccggaagtgaatttttctccgtgacgtcaatcgtcatggtatgttttgttccttggaattcatggcggtccgtatctacataataggttttcttcagcccgatttccggaattgaaatatagacgggcaatccgctttccaacccaggaataccgatcgcctgtatatttttcagctctttcttaatgccttttttctcagcctgcttcacttttgcgcgctgtttcagctgggcttcgttaatgtcgtcagaaaccgtttcggtatactgcaaaacgccgaatgttttcatgccggcgctgtctgaggcggaagcctttatcgttttattgtctttttgcagccgcatgacgacacgggttgcggtgtcatcaattgaggtgctgtattgataccctgtaatattaactcctgtttccagcacccatatgtcagacggctccggccattcacgcaagccgagcctgcctttttctgaatagagctgataattgcgccccgtctggctttttgtctgctttaacgcttttagcatcatatcgtaaaggcttgtatcatttttaaaaacgagtgatttaatagtatggcctgtgttggcaatggatgtgacgggaatttgaaaatcgctggcgatcctttttaatatttgatcagcgcgcttgttggaaaacacgtaaacgtcctggtttttcacaaggtattggagcatatcgtatgcggtgaaggcgacggtatgctcatcgggcgttcttgcaaaaacaatgccgcggaacagctcttttccgttccatttgaacaaaaccgtatccccttctgatacgccgtaatacgtctggctgccctgctttacgacaatcgtcgcttcgatggagcggggcgcctgatatctgtgtccttccagcgttacgctttctgtgacaagctcgagccactccgtttcttttatgacaaatagttcaatcatcttttcacccgtttcattgcggtatcttcagcttctgccccgggaagatccaatgccccggctgccggatattccgtttgctgcgcttaatcatggcggttttattcgcgttccagattttccgccactccgtgtgttttccgtaaaacttgccggcgatgtcccaaagcgtatccccttttttgacggtatatgttttgggtgaagctttggacgggcgcttcgctttcgtttttttcttttgtttgatttttcttggcgaagcggttttatattctttcagtacgatatcaaaattccggtcgccgatttcattgtcaccttcgctgtaattaaagctttcaatgctgcatgtgacattgatttttgtccctgtaatcaaaaactgaacgggttttttcgctttcatccatgcttcaatggctgaaatggctttttccggtgaaggaatgctttgatattcggcaatcgggctgtaccgtttcggaaaaaaagaagagaacgaaatttctttcgctcccggttcttcgataaacgtcacctctccaagtccggtgactttcacggaatcattctgcacgctgtttgcgatatcaatcgcttcagggagaacgggaagccggagcttgtccttcccttgagacagccaaaattcgtaaacagatttagtcaaaagcaacggccccctttgctccggtataaatgtctttttgcagttcatcaatcagcgcctgtttgattttggcggctaggctctcggcgtcctgcccgttatggaaatgctgatcgccgctgaattcgattttaatttcttttgttcccgttttttgaacggtttggccgccgcctttaacggctgcggaaaccgtgccggctgaaagcgccgccggttccgtccgggacggatcggacacttccatgccgagcgcctgagccgctttttgcagcagataacggccgcggatgccccgctcttcagggatgatccactcccgtttgttcccttcgccgacacgggcgatctgctccttggtaatcagacccccattggcataaccgacgtaagggccgccatgagccatacttttaatcccggggacattgctgatcgagccgtatcggcttttaatatagccgatagcggcagcggcgttgtggattggatttctgatatcattcatgcccggcgctttgtgatcttcaaaggtgctcggaatcgtctgcataagcccctgtgacgggtgtccggctttggcgttgctgtcccatagattaatggaattagggttgccgcctgactcatgctgtgcgatcgtcattaatcccggaagccagctgatcggcgtattggttgctttcattgcggccaaaagccattctttgacgcttcctcccgctgcacccatgccggaaaaggctgctgcaagcgagcctgcctgtttttccgcatattttttcacgtcaactgagctgagacctttgacgacgccgactgaagcaaagcgtccgagactcatcatgacacgggaaggagagtgaatatcaagctcttccctgaatgcgtcctcgacttttttggccatatctttggccgcctgtttgacttcgcttccttttgcagtcatccctgatacgaagtgtccgatcaggcctgaccccagccgttcgcggaatctcttgattgaacaaacggtttattgatatgtgtgcttacgtattgcgacgttcccgtatcttttgcattctgtccggccgaataacctttcactgtggcggcgccccatgatgacgattgattaacctccgattgataaggtgttttcacctttgtttttaaaaacgaatcggtgcccgtcggcgatgtattctgacctttggcatagcccgcagcgacttgctttccgtaatcgggcgaagacgaaataagggcgttaaacggcgttccgatgtttttctctttccagccgtccatatccaccgctttattgctgattccgctgtcaaagccttcagtaaactgtttgccgagtgatgaagccgtccccgcaaatccggaagcatccacagacgcagcggccgatacagacgccgaagaagaaacaccgcccgctcccgccggcacagcggaagactgagccgaagccgcgcccatatcatcgacaacacgcatgccgagcttagacgcagcttgtgaaagcagcatcttcccgcggccgcgattgttgtcgacggggatgacaaattctttaccggcttcaccgatccaggaaatggtcggctttgtaatgtagccgcccgtggcgtttttgtccgtttttttctttttatctccgccgcctcctgtgacaaagtccattacgcctgaaatcaatttgccgccggttttatcccaaatctttttcacccagtcgaatgctgcagaaaaagcatctgatatggctgttcccacttttacaagaggttcttttatatgtttctcaaaccagccgcttaaccctttccatatatcctttaccgtatctaaagcagtcgtgaaagcgtctgatattccttttccgactttttccaccatgtttttcaccgggttccagacaatatccatgaaccagccggataccgtactgaaaacagatttaattttatcccaagctcctgtgattttactccaaatggacgtcgctactccgacgacagccgattttacgggctcccagacagtgctcataaaccagccggatactgtgctgaagacaccttgaatcgtcgtccacgcattcacgatatttgaccatatgcttgtcgccactccggcgacagctgatgaaaccggcgtccatacattctccatgaaccaggatgacaccgtgctgaaaatcccttgaatcgtcgtccatgcattcacgatatttgaccagatgcttgtcgccactccggcgacagctgatgaaaccggcgtccatacattttccatgaaccaggatgaaacgcttccccaagtatcttgtactgttgtccaagcactttgcgccgcttcggaaatatcattccatgtgtctttcaaagcccctgaatcaaaggcctctcccaagctggaaccgcctaaactgccggcgatgccgcctaccgcgccgccgattaatgtgcccactccgggaacaacgctgccgattgccgctccggccgcggctcctgcaagaccgccgcctgctgagccgaccttctctcctgcattatctttattgatgccggctaaatcagtaagtgataacaattcacctatgccgggaattcctttagcggcaccttttaaccctttcataccgcctttcagcgcctttgaatctcctaagcctttcaaaagcccgccgatgcctttacctgccccttttgttttcggcgtgtttacggatgcctgtttgctttcctttacggaggaacctcttttcgaagatttattccgcccttcgactttactgcttttgcccctcgtcactccggtacagcagcagccgccccccaaagccccgccggtttttttggctgaccttcctgaagatttcggtgatggtcccgtgcgctgcggaccctttgtcagctcaggacgcttcgggctgttggtgccgccggcagaaaggctccccttactcttttcttttttcgtgccgcctcctaataatccgccgatattgagtttgcctaatttttcagcgattcctgaaaatattttttctattaattccccggctttttcgatgattttgtccgggctgaatttctcaaatttcttggcaatcttgctgacaattttatcaacaaatgcctcggctttttcgatgatcgcatcagggctgaacttgccgaactttttatcaatgcctccgaacagtgaggaagtaaactgctccactttttccagaatcttatccggattgagaaaatcgaatttctcagaaattcggtcaatcgtgtcatttacaaattgttcggcgcggtcgattagcttatcaggactgaatttaccgacaacgtcgtcgactttcttcataaacgaatcagtaaaatgatccagctctttcaatatggtctccggactgaatttgctgacaacgtcatcaacctttttcataaatgaatcagtgaatttatccagttctttcaatatggcttccggactgaatttactcacgaccccgtctacctttttcataaacgaatcagcgaatttgtccagctcggctaatatcgttgccgggctgaatttgctcgcgatttcgtccgcttttcccatgaataaggtcgtgaacttatccagctctgctaatatcgtctccgggctgaatttgcttgcaatctcgtccgctttccccatgaatgaggtcgtgaacttatccagctctgctaatatcgtctccgggctgaatttgcttgcaatctcgtccgcttttcccatgaatgacgtcgtgaacttgtccagttcggctaatatcgttgccgggctgaatttgctcgcaatctcgtccgctttccccatgaatgacgtcgtgaacttgtccagttcggctaatatcgttgccgggctgaatttgctcgcaatctcgtccgcttttcccatgaatgaggtcgtgaacttatccagctctgctaatatcgtctccgggctgaatttgcttgcaatctcgtccacttttcccatgaatgacgtcgtgaacttgtccagttcggctaatatcgttgccgggctgaatttgcttgcgatttcatccgctttccccatgaatgaggttgtgaacttgtccagctcggctaatatcgttgccgggctgaatttgcttgcgatttcatccgctttccccatgaatgaggtcgtgaacttgtccagctcggctaatatcgttgccgggctgaatttgcttgcgatttcatccactttccccatgaatgaggtcgtgaacttatccagctctgctaatattgtctccgggctgaatttgctcgcgatttcgtccgctttcttcataaagcttgcagcgaatttatccagttccgctatgattgtttccggataaaatttggatgcgatatcattgacttttttcatgaaggtgtctgcaatggagtcaagcattgaaaaatcatttttcggcgaagcaggagcagcagatgcagaagcttttccgacgtccggcatattcttttgcattgcagccagctgtgctgtcaccttttcgtttaacgataattgaatgacattgtttttccccgtcagcgaatcaatccccgctgaaattcggccgactgttttcatgacgtgatctatgacgcgtatagtgacagagtacccgttctttaacgcagattgcatgtagcgtttgatacgttccatggcaggagtcacttcgtctgacgcatacagtgaaacggtaaatcctttaaaaccggcagccagatcccgcaatctctcaaatgccgctgtcgcgctgtcttttgctcctattttaacggttaaagacgcaggcagacccgctaattgggcttgcaccttttgaatgacggcactggctccgtcttcagctgaaatagagatcatttgtgcgcccagctttcttttcatagagcgctggatgcggtcaattgttcttaaaacagatttactctctttgcgtatatcaatttcactttggcgttttgtcattttcctgtatttctcaagcgctctgaagccattttggattttccttattttctttgaaacccgatcttccaattcaaaacgggcggtcagctttgccatgatgtcgctccccctttcttcgcttgtttttcaagaatgtccagcttgtaaccgattaaaccgtacaacagcgccttaaaatgtctcggtgcttcatataactctttcagttctgatggagaataatgaagctcatgcatcgcgtaatagagatacacggcttccttattcccatcttttatcagttttttgcttcttgctccagatcttctaattcatcttcaaaaccattgatctcaatcgctttattcagccaatttgcatactcaccgccgactgaaagaacgcgttttgccacctcgaccggatctgccgttttgtaagcgtcgcggagctccttagaccggaaatcagggtaaatcgtagattcaaccgcgatccgcgcatagaagcgctggctgtctaagtcttttacgcggcctctgcccttcacatttttatatgtcgtgctttccttctccagttcgtcaatgcgctcagtcgtaatggctttaaaaataaaaggcacgatgtttccttttttatcgacaaaacgctttgaaagcggaacccggatctcctcagcctcgactgttttacccggcataaagaatgacagatcatatacttgttcgtttttttcgctcatgatgaaaactcccttactctttttttataaaaaaacaggcctataaaaggcctgtttcactcacaatgattctggttaaaacgtttcagaaagcttttccggcacatcgaaatcttcaaaggtaaacggcacttcttcttcgagggcttctgagtctacgtccagtccggcgatttttgcagaatcaaagttgacgtcatacagggtgacgcgttctgttccgcggcctgatgatttgtcgtcaagaacggcttgcagcgtaaaatacgggtcgctgccttttttgacgtaatccatcataaggacggcgaatttggatgtgaccttatagaatgttgccgtgcccgttccgttggcgcctgttgttttatgtcccgtcatgcggcggcccatgatgtttacttctgatttgtttttttccacgtttgcttcaaaggttttaatatgcgccatctcttctccgtcgagaaataaacggccttcttttcctgaaatcgtgttttgcgcttttaatgccatcttagtttacctccacattaaagtagaatttttctgccgcatccacaggctgtacggcgagatcgattaaaaagccgtcgcggtcttcattcagcccgattgtaatgtctttgtctgaatcaaagttagcgatgccgcccgcatcctggagcgttgtcaaatattgaataatcatcgttttgacgaattgaaggccgtcatttgtcgcaggaagatcgcttccggtgccttttttcgatttaattaaggctttcagttcacgtgtcaaatcgttattcaccgcatcaagcacacggacgattttgtttttcgcgaactttttgtttttctctgccgtaaatgtcaccaatgagttgatatctttttcaacgctgactgacttatcacgggcatcataagagaaaaggaattcacctttggaaagacgttcgatcacttcatcatgagtcaagcggtgcagcacatcgacggcgccttcgtattcaacgaatgttaaggattgattaaatgcggcgctggcacttgcgcctgccacccaggcggtcgcatcttcagctttaatctcagttccgtcttccagcagcacaccttcagtcacattgataatgccttcataatccccgctgtaatgggcggtcaccccttgcactttctgtccctgcgcatcgcgaaggcgtttaatgaatgcggcaaatgtcgctttcagctgatcgttttccgcgacaggaagagcgatgacatcgaaattctccgtttcagccgcagctaaaaaatccgtatagtctgagttgaccggtgctttatcagttcctcccgcgagacggatgcctgcctgcgggtttaacgtttccccggattcttcctcagtgcctgtcagcgggatggaagccgacagttcgcccgttcccgtaaatgtgacatagccgtttgcttttaattcttcggcttttttcaccgtttgtttgtcaacttccgcttcatccatgtaagtggtcacatcgaaagcggtctgatcaaggacgttttcactgatgcggatgatgatgtcatttccttttgaacccccgtacaaagcggttgctttaacaccttgcgaaagatctgcgctcgctctgattccctctgtcagacggtacatcaaaacggtttttgctttctttttcgcctcacgaagcagaatcagtgacggatcttcaatactgagccccacttttttattcaaatcctcaacgcttgaaatggaaacgaatgttttcgcttccccccagccggatgcgacgggaagggcgacaatcccgcgttcaccgatcgatacccgctcctgggcggttgttttaaagttaaaatagattccggcacgttctttttcttttccttgcgtaaatgttccgccgttcattattgcatgacctccttggttaaaaatgcttcaatgtaagacttggcttgcgcttttgtcatttgtttttgcttcacgccgaataaagcaccctggagaatctcgggttttacgccgaaaagctccttcgcgtgctttgttaaatccgccgtgtcataaagaaccgctcgttccgccgttgcggcgtttttctttttatattgtttcacttttgtttcaccccgctgttaatgtccacatcccgcagtgcgggagatgtttgtttttgatagtagtagcggctcgtccagcggatggtgatcactgcctcgcctttgtctccgactcttgtttcgatacggctgatgcggacgaaatcaccggtatcctcccctgattccgtaagcagcggaatcagctgtcttgattctctcaccgcatcggcgatcccgtcggctgcatagagggcctgcaccgagtcggcatggaacagcttcacattcagactgtatgtcttcttaaaggtggagactgtgtcattctcgtcaaaagcatacgggggcgggatgtaaagtgacggcacctgaaattgttcaggcagttcattttcatatacgggcacgccgcactgctgatacaaaaaagcggcgattgaaccggtctcgcgattcatccgatatctccccccaacgtgttaagccactgattgaaacgcttgtccagcgattcggcgaagagtgtttcatacaaaagaagggctttgtcccaaaacccatttccgctgatccactgttttttgagcgccattcccgttgaagctgacggatcatagatgaaccgggagccttgaaaatacccgggcacccatctgacattttcatctgagacggtccaatgtccgtcatttatgaatgaggcatactctacattggtgccgatttcaagggtcagtcccccgttttcaatgatccatacgtgatcctgcgctcctttccggaaagaagacagcaggctttctgtatcaatcccgcccgaatgaataagctcctcccgtaccaagtcgagaaaatcctctcctgactgttccagccattcgcctgcctgacgggcaaattctccggatgatgccttttgcagcgaccgattccattgttcaaggttttttatgctcatagtctgtcatctctcacagcgataacctcccaatggtgctgtcttgttttcttcggcatttccagaatatacgcctgtccttcccaaatgattttgtcattgacacgcacaacggcctctttcggaaaatgaacgagaaaccgctgatataccttatgatcaggctcaagctgaataagctgctgctgtttttcaacaaacagacacggcacgtcttcataatcgggcacttccggataagaaaagacaggctggagcttttcggcgggaatcccgaagcgtccggccttcggaactgacaccgtctcatgataaatatcgcatctgtcagtgagcagccgttcgtagctcataaaggtctcacctttgcgtgtgcagaaaccggagaataacccggcgcgatatattcacagagcagatggtgcaccgccggttttctgattccgccttcacctgccaccgtatacgagtagtcgcctatcttttcagattgataggcggaagcggctgcttcattctggttgatcagcgcaaaatattgagaaagctttaataacgcaagcttaatcttttcgggaagcggtgagtaaacagggtcagtgaacgaatgccccgccattctggccgcctccgcctccgcctccagaatgtcctgtataagaagcggctccggcctgtttttgacttgatcataaactgaatatgaaacaacgtcagacggctgaattaacataactgccacccccgtcttattctttaacgtttacgattttggcgcttgcatcttcttcttcaaatttgctgtcaagtttagccgtcagtacgataataaatttgcggctgcgaatatctttatctacttcgattcggatatttcttgaaaaaccgagaatgatatttttcgggtgagtcaaaatgatgtcagacgcatcgtactgggaatcaccttctccgactgagtacggctgcagattggacactcctttgaccggaacgccgaatgctgaagacaaaccgccctgcaccgcaagatctcccagattggtctgacggtcagccacacggtctttccattcaatctccatgccttgagatgtgtaaaatctgaattcctgaggcagtcgcaaatattttgccggaatggcttttaagccttttttaaatgtggctctggacagctcttccccgtttccgtcaatgacgtgagatacagtctgcttacggattccgtcaagctgtgccaagtacggatcagaagaagatgtatcgccgtttacgactagctcctcaatatcgactgccgcccgctccgccaaaatctgcatgatcgtctgctgcaggccgtctttttcaatattgttttcaagcgtgtcataggtgatattaatttccgcaatgacttctttcgtattcagctgcaccgtacttgttgacgggacggtcagctgatcgtcagttaaggcttttccttcctcagcggcacgcagaatacgctggccgaaaccgattttttcaaatttctgcgagtcattttccatttgaatcacacgcgattcgctgaaaatggtcggcgtgttctgcaccatgcggataaatgctgaagcttgtgcggggttcattaaaccgccgctttttaaagcggaaagtgacatttccgcctttctgatgatatcttgatttctcactctacagttcctccttctgactgggcttaaagcagtccgctccaaatggattttttaacaggctcttgaccgcccgtctcttcttccggctgctttgatgcgcctcttactttttcaagcgcttcaatgcgtttaataatcggcgccagcatgtcctcaacaagtgttttcagcttttcttcatcagacggcgcagccgccccgtctttgtcttccgtgttctggtccaaactgtcaagccgctttaaaagcgggtgcagcgcgtgttcaatcgattctcttacgtcttcttttctcatcttgttcaagtcctctcccttgcggtttcttgatttgcggtcacggtcgagaaattgcttgactgcgccgaataagccggcttgcttttctgccggctcttcgtaaacgtcagcggttcccgccatgctgtagcccgtaatgataccggctttaatctgatcccatacttcatcggaagctttggtgacaagcacccaagatcctttccggatcacagcattcccgatttcaaagtcatccggggcgacgtacgactccaccacctcgccggtcccgccttcaaaattatgatttgtatcgatgttgcgggcgtccgccaaaaaaccgtgagcggccttttcaatctcttcagccgtcatataatcgccatgtgcatcggggacatccggctcgtaaacgatgccgtaaacaagcttctgctcatccgattcgttttttgtaaacacctgcacctttttttcaaatgacggaaggcctccggctgattttgtaaaaaagaattccgtttggttcgccgccttatcgacatagctcacaaaactgatgacggcatttctcaattctctcggcacgagatgttttcaccccctttcaggattgctcctatttccctttcagcaccggccggctgtagtactcttcaggccattcctcaagcgtcttgccgagcactcttcccgccagatcacggaggtcattaggagagaccgcgccggcggaaataaatggcgtaagcaccttcgcaatttcaagcggatcgcgaaaatcaggcccttttaatgtgagctgtacatcgtggagacccagttcaggcaaaaataacgtgttgagcttattaatcagcgttttccgctccggctgaaacacctgctcctccgttattttccgtgccgtatcggctgtggctttgttgtattcctgcgcctctcccgtataaagcggcgggagacggaaagcggaacggagtttatttctgcttctgtcgtcatattcaagaaacagcgcatcatcctgcagaatttccgcaagtgatttaatttccacagacacgggcgtaatgtcttcgcctccgtgaaggtctttttccttcgcaatgccttccgcctcaatcagcagaaatttgtgggcgttttccaccccttccaggtcattcatataatcctgaagctctttgtacgaggtttctgacagcatgccgttttcaaccgtaatggcggccggcacgtgacggccctgcttgaaatacataaaattcagttcttccgctttccgggcgccgtacagattgacgatattgccgacccagcgcggaatgccgtaagtgccgctgccgatttttaagtgaatggcttcatttgcccggtattcttcagacagggtctttacgtattcaccggttctcatgtccatcatgcggggatcgccgtattccttaaaaaacactttccgtccgttcagcatctgaacatatttacggaaccgtttttgccttttaatcgttttggatgcgccgttttcttcatatgaaaatgtaacttcaacgggatcagtcacaccgcagacgcgcatatgtttcacatccagatattcaatccccgccggttttcccgcgccgtcccgaagcacttcgagaaaaccgttgcccgttttttcgcggtcttctatcgcatatccgaggaccgtctcggccgattcatcaaaatgaagacatttgtaaaagctctccagcttcatccagtttttttcggcccgggcctttttagacggtgagcaatctgggctatttacatcaaaggtatattccacatcgaacccaaaacccgtaatattgacccgatacgcgtcaatgcactgctgaagaatcgtcgagtattcggcgattgttttcagttcaatgagattatagggcggtgaaatgatgtcttcgccgtacagatcggcaaattgatcttcgttcatctgccttgcctgcggcgcggccatttttgatttaaagacggtggctctaacgttttgatagttaggcaacgcctatctcctcctttcccgattcggacgtctccgtttttgtgatgcatctttcagatccgccgcgtcatagtcatccagcgcataccaaatggctgaaagtgtgtggggatcaattgaaaactcatcttccgacagaacgccgtttttgttttttgcgtacgttaagttctgcaattcgcggatcgtattttcacagctgtctgagcaatagatatgtttgaaccgtttcagcttttttgtatactgaagtcttgagcccggaaactttttggccgcaaccatgcaaaatccctgcctgcggaaatattggatgcttttcggctcagccgaatccgctttgatcagctctttttgatccgccaattcttgaagctcctcagctgtctgatcatcggtcattttgtttttgtaatactcccagaaaatataaagctctttttgatccggatcgacggctagccggatgaccgcattgtatgactcttcaaaaccgaaatccatgccggtccgaaacagggggcgcctgatggacgcaatccgctccgttacttcgttgtgctccatgacctgaaactgcggaaacacgcggatgccgttgacgccgaaccgtcctttgcgggcgatccggtacaaatcaggatcgtaatgccgtaagctgtccagctgcttaatatagcttttcggcaaaaacagattatcgcacgctgtggaatggtggtaatacgtatctcccttaacgacggtgcctttttcatacagcgtctgatcatccaatacgaaccgttttttttggtcatcacgaaaaaaatgccggtacgtccaattggaggtgccgacgggatttgtggtgcatatcatatgcagcgaaagctcgggatgacgcagacggccgatcagctccttaaagccttcatacttcacttcagagcattcttcaatccaaatcagtgaaatatgatgaatggatttcaatttggccgggttgtccatccctttaaacataatccggcttccgtttgaaaatctgagctgcatcggtgaagaaacggcctttacggcatgtcccagttcaagctccgtgataatgtcttcaaataaggcaaacgtagaatccctgtgcgtatcgaaaacttcccgcacgacaagggccgtccgcttttcacgaagcagcttcaggatgattttcagcgcggtatgatagctttttgacgagccgtagcctccgacgagaaattggtacgtttcattccaattgaacaaataatcttcaaagcgcgggttgaccgctttttcaatcatggccgttcctctttccgcgtaatgacaatgtcaatcggcttttggctgtcttctgttttttccatcttctgctgtgccagctttaatttttcattttcgattttttgtttaaattggtcagggaaaaggtcaaagtacaaggacagcttttcaagagccttcatcttgtccgcaagctttattgcaatgccttctttcccgagttttgcttccgtgacgatggttccgtccagaaggtgcgaatctttaacgtcaacgtagctgatctcctgcataatcggattatcattctcgtcaaagagcggccctgattttccgaaggcctgaacctctttttttccgaaggttacataatcggtaatgtcagcgaaagcgattttcacatagacttgaagaacgtccatcgcttcgacaaacactttattgaccatttcctttttcatgcggctgatttctttagcgactttttcgttttttaacagcctgcttcccgtcacatgcgcgctttccggtgaatacccggcttttatcgcagattgggtggcgttaaagcatttcacataataaagacaaaacagccgctggcgttcgtttaactcatcaccttcgcccgggttgttttttccgccgctttccgcgttctttttaagcgcctcgtcccagcgcccttcttttttccatctgccgattgttcttgcggatacgcctgatttgccggcaagggcgcgatttgtgatgcggcctttatgagactgatagattgtaaatgcctgttctctttttgcgtttttcatgctacggcatcaccgccacctccgacatgattgtctataataaaaagcggcttctaatcgggccgctttttgtgatcgtctgttcacttctaggtggcaaacgtatgacaacttatgaagcaggcgattgatttctttgttcctgctgtttttgaattttcagaagcgcccgtttgaccgtcgtttgtacggttgatttctttacattcagcaaggcggcgatccgttcatacgaaaagcattccgctttgtggagcagcagcatttctttttctctatccgttaaaacggctaatgcgtcccgcagtctgattctgtcttcttcagtcacatttgcggacggttcaaacatcagcgcctgcgaataggtttctatgattctcggatctttaatgagcattctctgataagcgtctctgcggtctatcgctcttcttatgccgggctgccggcctttttcaagccattcgatgacatattccaaatctgtaataatcgttctgatgatttttttatctttcagttcttctgaagtaaacaccgtttcatccgctgcctccagctgcttgtaccactttttcgtctctttcagcgtgcgtttatattcaaatagtaagtcttccatgtagatcctcctctttttcggaacaaaaaaggacaccaatcaatgcgcagcatgtgcgcgattgatcagtgtccgcaggctttccgtcttggacgtattctgtttttttcgattaattcaatttaaagccgatttcatattcgacccgggccagatccccttttcgcgtttcgacaagcgttttgccgtgctccggcgcttcggcgagccatgcttccttcttcagtccgtctactataatcacccgaaccttgccttcttccagctggctttttaatgttgtatgttcaatgtcagtcagttttttaggattcatgttttacttcctccatctttttcaaaatgttcacttcatgtatgaggcttccgagctcatttatgaacgcttctttttcttcagaactttctccccggagcaggcggagagccgtttcggccgcctcaaagagttccggggctttcgccatcaatgccgcgttgatctgctgtgagtatgaacttaagttgaaaacggccgcgatgagccttccgtttgaataagggaacttctctttatccgcttcgctgtaagcggaataaatgtaaatgggtttttcttctccgctgtgtacggcccgccatggagcggggctgtttttttcttgcaatggtgatcctcactttccatcagcctcatgccatgcttcaatttgcttttctatccgttttgccctgaacagcaggcaaaaaagccatttgatatatttacacacgtgcatcaagcctcgcttttgcgtcttgaaccattcgttcaagccgtttaatgaccggcgttaaatcagtgcctgttttgcagttcgggcaagggtgaaagacagcgccgaaacccgtttccatcacaatgaccttcttcggcccgcacagcttacacattatctcgccccctctaatctgtggtttacgtcaaatgaattgccattaatgatgactaaataatcgctgcacatctcataaattcttgtgcccaaggcttcatcaacctgcaccaatccgtcacaggccagctcgctcgagataagaaccggcttatgatttaaatagcggtaattcacgacggcgtacatttgttcaatctgccaatcggtcgcccggggttttccgttcagcggtttgaacagatcgtcaataaaaagcacatccgcctgtttcatacggccaagctttgcatcgagcagatcaaaatcattttttaaatccgtaaagccctccacaaaaggaaaatacagcaccggtgtctgcttctgtctcatgacataattgctgagagcggtcaaaagatgggtttttcccgatcccggacgccctaaaagggcaatgctgtttttccggcagtttttcatcttgtcgaagttctcaacatattcaagggcgcactcatatgcgtcgacgactgcctgaggcttgccccgcgtgataaatcctttgaaatccagcttccgaaaggcatctgtaatctcacttgcgccgagaatgcgttctactttccgttcggcggcgcagcggcacttaacccatacttccattcccagctggtttttgagataaccgccctgatctttacagagcgggcagtcaaagcggcttttgtctgattcttccggtctgtccgccagtaatggacgttttccgtttttcaggtcggcaagaatctgctcgatcgttcgttttgtcatgtatcgtattcctctctttttttgttgtgattgtccttcccgcaattcgtgcattcaagcggtcttccataaacttggcgcaatagctgaaagccttgatcgtttcagctgaagaggtgcgccgctgttcaaaagcggtaaagcattcgccgagccatttgattgcttcttgtgctgacgcaccgagggaaacaatacgggcgatggcctgataatcccggggcgacgggtatacgctccgcccctcctgtgcagaccttaatctgataaaatgggcagcaatgtcgttaatcgcttcttcagcagtatgattttttgttatatctatttctctccggacatttttgtcccggtgatccgccgatattgtccggtcagttgcttccgggcgggttaatgtctttttcggcgtgaatcttttcgagtgctttacggagacgatgagtccgtaaggggcgcggacggttttgatatactcatgctgttccaagctctcgagccaccgcctgacggttttttcgctgaccgcgaatacatcggccatttctcttgcttttacgggcttatgtccgaggacgatcccccactttacgccgtcttttacatgttcctttgtcgttgagctgatgaaccataaaaacagccaaatggcggaccctattttgtcataatgttctgaattcaataatccagaatagatgaaaaacgggtagcttttacgtttcataagggacatctccatttttcttcagacctatatagcgttcatactgcaatcggttatcaaatcggaataccggtagtccgcaagcggtaaaagatatcgaaccgcctgcttttcctaaacatctctggtcagccggattgctgctgaaacggatgattatcggctgcatctctcaccctcctgatcaatttcttatcgtattttgatacattttgtatccctatgatgttgattatatacgatacatttcgtatcatcaagacctttttgatactttttttatcatctctttcttttgatacattttgtatctataatcataagtaacttagggtgttgaaaaaagagaggtcatttcggatgataggcggaagattaaagagtctcagaggtaagaaaacgcaggaagaagtcgcaaatcatatcggtgtctcgcgcgccagatattctcattatgaaaacggccgatctgaacccgattacgacacgctgcaaaagcttgcggattatttcaaagtgtcgactgattatttgttaaccggaaaagaaccttcagatgaagacatgtttgccgatcccgacctgcagatcgcatatcgggacatgcaggacttttccccggaaagcaagcagcaggccattgaattcattaattatttaaaagaaaaagagaaaaaccgcaggccgaaacataaataatccgctcttttcctttaaactgcttaacgttcagccgatataaaagctgaatgtttatttttaaaagaaaagggaattgattcaaagtccgatcagggcttttctttctcgcttaaaaaagaacatatgttcgaaagggtgtattcaattgggcgattttttaacacatcttgaggaatacgtcaaaaacttatattgccgcatgggaatgaccgcccctctccatattgatatgcagatgattgccaaggagcttgacatttggattcattttgaagatacgcacagtatgatgctgaagcgggacggcatgtacagcatcgtcctgaatcaaaaaaagtcacccgaagagcaatggcaggattttgcgcacgaactgtgccatgtgctgaagcataccgggaaccattttcatatgaacaagctgttcagggaactgcaggaatttcaggccaaccattttatgtaccacttctgtgtgccgacctttatgctgttaaacatggagctgccccagcggaggagccacgccgttattttaatcgcagccgctttccgggtgacggcatcatttgcggaaaaaaggctcgagctgtttgaacggcgtaaagcaggtattcaatttcagaagcggctcgcttgtctgttatccgacaagcggccgaatgtgtattatggaagcggacagacacacttgcatgccgctgaagaaaaaacgccgtattttattgaaaattagcgattctccgccggcttagaacacagccggcagaatgtcatcattttgacatcggagaaaaggtttttgcatcatgacgctgtaatcaccgtgctgcccgccaagcacttcatgcgccgcatagctccagtgaatgtaagaacgggccccctgttcatttatcataaaaaccggccttcacggtttctacataccgaaaaaacagatcggttggcgtgtatttttctccccggcagccaaaattgctgaacagcgcgtgtctctgcgccgtgctcacttccaattgcagccccattttcctttttgtccgattgacaatgttgccgggatttaaccctgccagccgatcattcttctctgtcagctcggcatcaaatcccgcttcacgcagcagatcacaaatcagtcttgctttttccagatccgcgcccccgacgagtgtatttgcctttttcagatcatgatacccgtgaaaagccaatgcgtaatgatgggcggtcactttttctaaagccagaggctcgtcaaagcgtgtgcttgtcaagtggagagaacggttatcgcaccgcttcgtcccttcaaataaataaattgagctttggtcagaaaatgcatgcaccagctcactgacacccggctcaatcctgccgccgtggggagcgaggacgatacatttacttccctctttttcttcataaataattctgtattccgattcagcagcggaaagggctgcgaaattgtcatatctatctttcatgtgtaacatgctctccttttccagtcagcaccagtttactctactcatctgggaatggaaacctttttatagtatgatttgatagaatacgtatcagggaggagatatcatggggttcatcaacggattgctgggcaatgcgtcgacaatatcgacggctgaagcaaaatcagaactggcccgtattttgctggaaggcgagaatgtcaatgccgcatttaagcttgtccgagatatcattgtctttacggataagcgtcttattcttgttgataaacagggactcacggggaagaaaacggagattcaatccattccgtacaagagcatttccagattcagcgtagaaaccgccggccgctttgaccttgattcagagctgaaaatttggatttcaggcgcggaacttcccgctgtctcaaagcagtttaaaaaagatgaaagcatttatgatattcaaaaggcccttgccgcagtttgtatgtaagaagaaacggaagcccggggagcttccgttttcttgattacagtttttcttcaattttcgccttcgttttcgggccgtaaattccgtctgccgttaatccgctgacggattgaaaacgttttacggcatttgccgttttcgggccgtaaacgccgtccgccccatgattttttgctcctttatcgggataaaaataaagtgcggataaagcgttttgcacttgttttacgtttgtccctttcgtcagcggtttcgtcactttgatcacaccggatggaagcggatatgaagacacagcctgactttttgaagaagaacccgtctgagcgagcttgatcacttgtccgactgtaatgtgattcggatcggtgatatggttgatgctttgcagcgattttacgctgacaccgtgcgatgcggcgatttccgataaggtgtcgccttttttcacatggtattcagacgcggaagaagaaatagaggcttttttcgccggcatacttccgcttaatttcttttcaatcttcgccttcacttcatcccagcggccttcagacaaaatgcggtgcgggcagtactttccgttccagtcctgatgctttctgattctgtcaatcccccagccccgttctttcaaaagctgcgccgcaaacgcaatcgccagttcttctgcggctctgtaccgttcgccgcctgacttgctgtaacagatttctatagcaatcgacttgcggtttccggtaccgttcgtgccgtctcccgaatgccaggcattccggtccaacggaattccctggatcacttctttgtcatcaaccgcaaaatgatagctcgttgattcgctgtttcccgtcatatagctgatttcattagcggcggatgcgtcgtttgccgtgttatgaatggtaatatactccggcgtcatcggattcggacattttaacgcatatttatcagccgatacgagccgttttttcacttcaatccccactcttcatctctccttatgcctttttcatcaataggtggcattcgtaggacagataacttgagcatatcgaccctgcattcggataaaattggaatggacacgcatgcaaaaaataagacccttccaaagaagggtctttatgttatgtttggttgcgtgcggcaatatggaatgtgccgtccgcttggttttccaaatggctttcatggccgatcacctgtgtaaagctgaacccgacagcaacaagcagcaatcctgacaacagtttagatttcatatagacaatctcctctctggatttgtttttgggcgtgcaccattttttcataaaacgtgagcgctttttcaggctgtccgtgtttcatgtaaaatttggcagcgtcatgcgccaattcttccacatacggatacaacatgtgttcttccagaaaatcaaacgtgtgcctgacggatgcgttatccatttccttgccgtataacgcatgcaaaaattggaacagattgacaaacaattcatcattgtattcgcgggcgatactgagcccgaggcgatattgcttctctgcttcggctgtagtgttctgtttataaagaacctgtgttaatgagtaaatagaatgcggaagattatcgaacttttctgacctgcaaatggaaacggatgtctcaaaatattcggctgctttagagaggtctcccattttttcgtaacagtttccgagattatataaggctgaactgataagacggggattgccttcttgttttgcaagatctaaagcaagttctaagtggggcaatgctctttctggatactgcatgtcatcataattccctgcaataacgaattcacattggattctgcggacgttgtacgtctcatacgattggtacgtttcaagggcttgaacggcataactcatggagacgtaggtttgtttcaggttgtaaaaaatctcggccattttaaaagcaaactcagctttctcgatgtcatcagaaacgagtgcaaggtttttttcagcccgtttgtaatacatcatggcgtttaggaacattttctgtttaaattcgtacattcctcgaaaaaaattaaagtagtaatcaagcagtcctgtcagtttatactggttgccttcaatgtcttccaataattctgaaaactcaggctgagaagggtcctcctttaagggcttgatgtaatccagcatgacgcggtgtctgaattccattaatgaataatacagcagcagatcctgatcttcttccatatcctcaatctctctctctacttcacgtttgacgcgctccgcctcaaggacgtgaaactgccggatatgggtataccattcattaattttgagcccgacaaaagaggacggaatagtctgcttcatcctcaataaatccccccttttggaatgaccgagatatgtcatattttatcataattgctagaaaaagaagaacgcaaaaagaccgcaattgtcgaatttcggatatccgcaacgatttatctccatcacaagcttattgcttgtttcttccgtgccgttgatatagcatatccttgcagcttttattctgtattaaatgggggttttcacatgacagcacaaaatcaattggtcagccactttctgtcacatcgaaacgtgacgattgagctggcggaaaaaatcagccgcgagcattacgactacaagccggcggagacatcaatgtccgctcaggaacttgtaaaacacatcgtttattcttttcttatgtttgcaaacgtcattaacgacggaaacgggtcagctatccagaacaaaccgaaagaagaagcggaaacagacctcgtcaaactggctgaagcatgtactgaaaaaacgacagacatcctgtcacagctgactgaagagcagctgaaccgcgaaattgacctgactgcctctttcggcagaaaaataaccggcgcggctctccttcagcttgccatggagcatgaaattcatcataaaggcaatcttttcgtgtatgtcagagaaatgggccacacggaacttccgttttatcagcaaaaatcataatccggccatcatccgccgatctgcgaaataacagcaggcaggcggattttttgttctgtataaaattttccgaaaatttaattgattaccgcctcttaatcatatataatctgataaaaatagtaggattattcaggaggcacacagatgactgtaagcattgtgtttatgggtttctttgtcggaacgctggtcggattgacgggtgtggggggagcggcgcttttgactcctttactgatcgttttggggatcaacccctcaatcgccgtcggcactgaccttttatataattccatcaccaaactgttcggtgtcgtttctcattggaagcagcgcaccgttcaatttaaacttgtcggctacttggcgctcgggagcattcccagcgcaacagccgccatcggtattcttcacttgtttcccgcttttcaccagcatcaggagcagattatcaaacaggcgctcggctacgtgctgacccttgtcgccatttccattatcgcccgcctttttttcgataaaaaactgcggccgaaccgctggcagcaaaaaacacttgaagaaaagcggacactcatgatactgatcggcgtcattttcggcttcatcgtcggcctgacatctattgggtccggctcattatttgcgatcgccatgttatacctgttcagaatgaaaacagcagaagtggtgggaacggatatcgcacatgcctttttgctcgtaactgttgccggtctgttaaacgcaagcttcggaagcgtcgattacctgcttgtattgaatctgttgatcggctctgtgccgggtgtgcttctcggcagcttcttttcgccgaaattctcaccgcgcccgctgcagtttgtgatggcggcgattattttaatcagcgggataaaattaatctaaaaaaagcgtcctttacaggatcgcttttttatttgggaaatcccctcaatccaaagccaatggggtgggaatttctttattaactaaccttaaaagtgcatataattgtccggttttccctaacatcataccaagtcccgaatgatcatttcttattccattttgccagccatttttcaacagggtctctttaaaatggttaacccatatattaattgtattctcaatctcttgcttgcgatttttaaagagagataattccttaatagcgtgaagtacatctatattccccatcgttccatggcataatgagtagccctgacgatgggaatttccattcagcaatgtgtcatctaaagactcattaatatacccaacgtgaatgcgcccgtctacattctcgtatatcctgcttcttccaagaagaataccgcaagacccgtgacaccacattgcggaagaataatccgactcattttttctgttatccctccatttttttattttagtatcaaaaaatttatcttcgtatttgagagctgattcaatcagtctaagtacttctccagatgcctcaatatgcgcataatattcagatagtgcataacaaatcccagtaataccgtgagaaaaccctgctaaaacaacattctcatccgcgtcggatttccaatatgcttcatttctattttgaatcattcttttgcatatttctttacaaactgcccttgccgtatcttccattaattcagtccgataatacctgccaagctgaatcacaacctttaatatacctgcgagtccgcctataaaatcggtatgtgttatttgagcggtttcctgacgaagtttctctaagtatgctttacacatactattcacttcattttccgaataaagtccggtacctctcattttattgacaaaatagatataagaacttgacccgtaaaaagcagagaaatttgttttataaatactatgctcatatatttgattaattgaattcactattttacgaagaatcgatttgactttttcatcattataaataaaatcataagctgaaaaataaagccccactccagctaacccatcgtacagcccaaaactcaacggtcctacggataaggtgccattgggagccgagactattgatacccattgaagatatttctccgattcgattgcttgttttaatatacaatctgtttctatttgaatcagctctttgatttgtatgtcattttttaaatatccaggtacaaaatcatcaatttgatttttataaataatatccaaattagccgccgtggagcttaaggccatatttatcaagctcacttgctgatgcatgtcttcttccgacatattcgctaaacgagttaaaacttcttgtttagcgctttgtttcataatccctgtatccaccacatgtattgaatttgaataaacccttttttcactaataggagcattaaaatagggtatatcaccgatcatcatatccttgatctcaaatggactgatggaatcaaatacttcatattttgtataagcatccttaataaaagataaaacccttatcctttctccataatcttttaaatacataggatggaggagggtttcaagaaatgaagcgtaaacatatgtaggtctgacaataattctaataggggcataatttaattcgcttataaggttccgtatatataaatcttctttcaaaatcaagaatattcttttgaagccttcaataaattctctttcaaattcaaaacattctgctactttatttttgtaaacaggaagattccttccccttttgaagagatattgtttctttcttatagaaattttatctgtttttatatgaagcacttcttctttttcacctttttgattttctgtgtttatcaagcctcctatattagtcagcccattatcttccggaaaactcatatagttaaaaagtgcagattttaatattgttttatttacctgtgctgatgccattaaattaacattttccttgttctcctcagaaaaaaagaggctgctttgaaacagagtctcaagatcaaccaacactggtttatcacgacatgctatgatattttcaaaatgaaaatctgacccttgaaaagcataaataaatcctaaatgcattccaaattggtaataataatttcttacctgttcaatattatcgcacggttcagactgtacatactcttgccacccgtactcaccttgatccaaggataaaggtgtttttaaattagtttgataatactgattgacataatcaatgaccttttcataaaaaacatcaatttcaagtgaacggggtttataaacgagtttgttattctcaaattcaataataacaacacttttaccgccattatgaacatcccctgcattcatattaacctttctcatttttccgaacgaaaagttgaatttttgttggatttttttatagtcattaacccaatgtttaataatagatatagtgaagcgtataaaatcagaggtggatctggagattaaatcttgcaatacaggataattattgagtatttcttcaacaaatgcggagtttttcagcctttctgagaatatatcataatttttagattcatttttttcatcaaactcgtcaaaagtttgatgaaactcatggataagtgttttccccgccaaatagtatatttttttcttataattaattaatatcgattcaacaagacatcccttatccaacagactttcggatggtattctatctatttctttaacaatctgagctttaaaaatacttatataatactgcgcaaaaccttcgaaataatcctcttctttaaaaatattcaacatagagttttcataaacatagttagccgaattctgtgttttgttcacaattatcacttccttatatattcttgactgtctttgacaaaaaagaaaaagaatatgtacgcatatacatattctttttcggatatgtttaatcgttacatggactgacaatggacgcacactttgtcgtcggacagcctgctaaagagattggtattgtgatggttgtcggcgttacggtcatcggggttgcatctgaaccccctgcaaggttttttaattcttcttcagtcattggagtcagtgcttgaaaatcttttttcatgttaattcctcctattgtttgagttttttataaatttcagtcgttacatggactgacaatagacgcacatttagttgtcggacagcctgctaaagagattggtattgtgatggttgtcggtgttacagtcattggagttgcctccgagcccccgccaattcttttaattcttcctcagtcattagttccaatgctaaaaattcttttttcattaaaaatccccccgattgttttttatacttgcctttgcggacatgcgcagcctactgtgatagttggacaaacatgatttgttattggaattgttgttattgatactgagttttgccctccaataagctctcttaattcttgctctgatgtttcatacaacgcgctgaagttctctttcatattccatatttcacctcctttcaagttaataagtctgctggagctgtgattcatatttggtcttaatcgtctttaagtttccattttcaatctcgtagacagattcggagaattcgagccattcggttctatgagtaatagaaattacagtgatatcctttttgtaaatgttatttaatatatttaattctgtatccttatccaaattgcttgttccttcatctataaatagaattcgcggatttttcgctaatactctggctattgagattctctgccgctgtccacctgataaggtaataccattttctccaatcatggtatgatacccataggcatttttataatatcctcatgaatacatgcttcttttgcagcttgtacaacttcttccattgttattttttcattgaaatattttatattatttataatagtgtcattaaacagattgacatcttgaacaatataacctaacgtttctctcagcttaaccatattaacgtcctcgattttgaattcaccgtagcaaatttctcctgctgttttttgataaaggccggcaatgattttaatcaaagtagactttccgcttccagtttttccaattaatgtgattttttctctcggccggatcattaaatttatattattcaaaatataatcgtttccgttgtagctgaaatcaatatttttcaagctgatattatgagcggccgggttaaatagttcaatgcttttatcatttacttcctcatctttttcatccagtacagcctcaaccctgtctaccatttcttcaactaatttaatagactctaaactgccgataattgatcccagcggagacataaaccgtccggcaatgttagaaaaagcaattactgcgcctagcgtaaggcctatagatactgctgaccaagtacccacaattaaaataagtaatggcaaagatagattgattgcattggagaccgcacccagtaaagatgaataattcattcttttagagaaataatctaactgatgattaaagttataatttaattggctctcaatattcctggtttctcctattgtttttataaatgtcattgatcttaagatttcgattagctggctctgaaaattggattgactatttacttcctgttttgtgaacatttcaattttcggaagcaaaattttagtactcatcacctgtatagctgctcccaataaaactataaaagataatatcggagaataaacaaacatgactatgaaaaatacaaatataagactgatatctaatatcaaagtagacgctaacctggaaatgacttcacgaattacagcaatgttatggattctagttgaaatatccccggcagtattcgcctcaaaaaactttaatggaagactaaatattttatgaattattttatcagtcatactcttattaatttttaattgcagtttgataataaatttcattctgattaaggacagactaaagaataatacgattgaaacaattacaatcatgaaaagcattggtatgggaagaattttctcatttccgtcaataaatgaatcaataatatattgagtcaaaaaaggggtcattaagtttaatgcttgaaaaataaaagtgaaacttataataacccccaacaattttttatctttcaaaagatattttccgatctttctaaatgaagacacatcttttaacgacgaagcagtcttatcctttctctcaagttcgttctttctgattaacataatagaaatgccattatagaaggttttgaactcttctaatgtgattgtcagtctgccagacgaagggtctataattttaacgttatctgtgccaaatgcgtcgacaactacaaaatgattatgattccaatgaacaattagcggatggtttttatttaactctttaagctgcgttatattgtctgtgcggaatgctttgaaatcataatcgaatgtttcagaaatccttttcatttctattaaatcagtgccgtctcttccgataatttctttatttaatttcaatttgttaggattgatttttattccctcagccctgctcaaaaccatggctaaacaagtaataccgcaatcaaattgatttctttgaagaataaccggaagctttctttttctaattttcataaatgtctcctaatgtatctacacgtcctatttcaagattgagaatattcggcaattctgcgtctgctgcatacagcattccatatacgatccccgctaaaccaagcattaaattaggtgtttcaacatcccttccaactccgcattggtagaaacctatatttttgtcttgtacactctccaaaatcaagttttttcctatatttacaaattgactttcaccagtcttttttccatattcgatcagtattaaagcatttcccatgtctccgtgacaaagactttgctctcggccaaaaccgtcataaaaaatgttagaaacggttttattcagatcttttttggccacttcggcaatatcagggtgttttgaatctttcaattctaatctgcttaatagaattccaggggatccatggcaccatgcagatgttgcagcttcatttaccgtttttctcagatcaagccagttaccgtttactttttttgaattttcaaaagcaagtccttttcggatgtacatacttatatcttgatgttttgaatgtttctcgagtaattgaagggcatatatcattccagcgtttccatgggaaaaacccgttaacggcttatttgcaataccttcccaagtgacaaaatcctcatcaagaaagatcgcttgtttcattaaaaatgaaccgcattgttcagccaatgataaaaagaatgtatcattctctatttcaaacgaacgtatcattacaataagagccctgctgtgcccccgattatatccaattctttatcataaggaagcaaggacggaataagctgagcgatttgttttgcattctgtttatatttttcgcgtttagtatacatatagaaattcattaaagtatatactattgaagacactccggaaaaagcacctacagacatactgctgtcttcgtccggtttcacctcaatatcaataaaacgagagatgacatctttcataattttttcggcaatgtccagatacttttcttttttcgtgacgcgccataaagccaggtaggtgaaagccatcccggaaagcccgtcgtaaaaggtatcacccataacggataagttccattgaatttcatcaactccaataggagtagcgttaagccaagaatacgaacttcctttatctgtgtgtgctttgtaagattgattataaatataagcggccaattcctctgctttttctattaagatactttcttggttactactgaaaacatttacatattgtcctggttcttttgttataaattctttcaaaacaatttgccgatcatcctccgaagcaagcattgacagttcgataacatagagctgaaactttaaatcgtcttttgataaatttgaaattctttcttttacactttgagctggtgtttccggaaagtaattttcaattttcttattttttgagcttagtaagtctttctcattcaatttcactttgaaataaggtatatcattattaattaaatcgttgaactcatatttaacaatagattgatattcatcttcttgctttggtctctcccatatttttgataagaaaatttctctatcaatagagttgtgtaaaaatctaggatgaaaacttaattctaataaagcagaatactttattgtcggttttgatataaaccgaacatatatcttgttttcgctcttttctattatgcgaatcagctccgaagcatgttttaatatagtcatatatgcttttgaaaaaccttgcttcagttcttcgacataatcttttgcatatacaaatttattctcaagcatagggtgattattagctgtatcaatttcgacatagtctcgtttgacagacatttctgctgtctttaaattgataagctgaggaactttaatgatcgactttgctttccctttccgacctattccgctgatgtcggctttgcccgcaaagaaaaaaggaagcagccctaatgctctgacagattcatgaagctgcgtttcagctttttcataagcgtccatcccatcctttttttctggtatgcaggatgaaataaggattccaaatcaatgagaactggatagctgccgttggcaatgagattttccgaatgaaaatcaacagctttcaatgcatataacaaaccgatttgagctcctgtacgctgataaaagttttgaacatcttttaaacaattgcatgctttaaaagatataaattcagtccatccatatccgtctctgctaaggacattcggagtgctcaattttatatcatgatctctaattttctcattcaaaaattcaattatctttttatataatagatcaatttctaaacttctcggcttataaataagtttaccttcatttaatgttattttagtaacctttctcccatcagaatgagaatcacccatccctacttcaatgtcccttattttgacttgttctgaaaaaccaaataaagagagcagttcaggcttgtccttttcaaaacgggagataaattccagtatgaattttttgaattttctcagttcatttccaatcgctcttaataagactggatatcgttggaaaaagttttcaagatactcctgactgcacaaaagagttttattataatcaccatatttttctttaggagtctcccctgccaaaaaacctttttcccgattcatattcatatccaatacaagtgttctataggatacttttaaaatgattttttctaattgatttgaaatactatgatgaaaaagagccggttgttccagcagatagtcataagaaggaaactttgattttttaagtagatcattgaagtaagaggacacttttaacgcaaaaacgtgaaacatgatttcttcatttacgtcttcttttttaatagcttggtgagcgatccctttttttaggttttcgaaaacatgaactgtaaaagcggatttatgtagtggggtttgatataagcttttcactttatcaattgattgaatggataacacattataaatgctttcctgggccatttgaatatcattcttatagattagttctaagtttcgatcaaacagtttctcattttcatcaaattgagagacagcagcttttttttctttacttaatagaatattagttagcgaattcatttaatattcatctcctttaaaaaaagagggagacagctggatctcccagagcattggaaatctattttcttatttcgggttgttttaacaccagcaagtgtgagtaggacaaagaccgcattcccaagttaacgtacaaagcttaccatcatttccttgagaaatccctcgctgttctgcgcctcctcctccgctgaattcacttaaagaaatttcctcaagttcttctcttaaatcaccggcaaaacgatacattttctcattcattaatattcctccccttgatttttgaaatatattggattttgatccatatatttctataaacctatgataaacgatcttttacctataggcaccgaaaagtcatattcggaaaagcgctttttttttgcgcgtttccgaagtataggttataaagaaaatcgggattaactgttccgttaatcccgattcatttactcatatatagttttcatagaaattaatgaatatcgatttgctttgatcagtgcctctgttctggattttactccgagcttgttgtacacaccagtaagaatgtattcaaccgctctttgactgatcaacagctttgctgataattcccggtttgtcattccctccgctacgcccgctaagatatcttgttctctttcatttaaagtaatatctcttattctatcttcaagcttatcaatgttgaacgtatttgcttctgttcttcttaattgtttaaagagatgagtaggaataatggtatctccctcaatgacactttcaattacttttatcatatgttcttctgttgatgacttacttatgaacccggaaacaccaacttcaaccaaaagattgaaatgcacagagatatcaaaaccagtataaattataattttttgatcggggctctctctaagaatcatttttgacaattccattccatttaactccggcatatataaatcaagtaaaattaagtcatactcataatgcttaaggtgattaagtacttctttacagcaagacaatattgttactcccattttattgcttttttcaagaatggcttttgtcccttgagcaacaccaatatgatcatcaattaatagaatctttatcatgtcagcgctccctattcatttttcgtacttatttcaaaccttaacagcaatccttcatttacgcttgaagatatattatgaataccattcatacaatttatccgctcttttatccctgtcagcccaaaactgtttgtttttgaatttactttattccaatcaatgccgattccattatcttcgtaaacaaacataagacttgtttttttttgaatcatcgtcaaaacaatataactggcttttgaatgttttacagcattagtaagcagttcttgaacaatccggtaaatgtttattgtgatatcttctgtaaaaatagaatcatcttttacatctacaaagaattcaatatcaagctgatagttgcttttatgtttatcaatcaggacttgaatgcttcgaagaagtcccatctccattaaaaaaggtggtcttaaatcaaaacatttttctcttatatactggatattgtccagcaaaatttctcttatgtaataaatatccttgtatttctcaacatgatactctaattctctgcatacaaatatcagctcttgaatgatagagtcatgaatatcctgtgcaagcttggttctctctatttctgaaattgaaaataaaaccttagaaagtacagccgacttacatttatgttgatcgtctatgataatttcatcaatttttttttgaatcaataatttgttctgaagtgcagatgctgtgcagaatgccagcattcgcagccaatctgcctcgttttcacgaatctttatagggtgtccttcatgtgataaatgaataaaaacaaatgtatcacacttctccccgataaacagaattgatccgctggcggtttcacgtatttctcctatcttaaaatttgaaatgtttatgttaggaacttgaatgtttttttctctcaattttaatgtttttttgtcatagtttataagagcaatctgctttcctgagagcacactctgtatttcattggttagttcttttatcaattgatctgcatcggatcccttttgacataattctgaaaaacggaacaggctgcgaagatatgtcttatttctgtcatcataggtaaagcataaacaactactgccgaatatacttagaacaaaaaatagactatactgtttaaactgtaattggctgtctgttataagcaaaagcataaaaaacaataataaggagaaaacaaaagcccttgcaaactgctcaatattaagcttcacccaattatctttcatttgtatccaagccccttactaaggaaaataagggaatccctttgaatccccttaaaatgaaaaagttactttacacttattaaaatataaacagcaaaggcaacaatgtataccagaaatgatccagtcataaattttacaggttttcttgaaaagtttagtacgcctcttaatccgtcattcaaaatcattccgaaaaaggtaaccagtgtaactcctaaagcgagcattgaaatcacaaaaataacttgctccatgtatactcatcctccatttacattctgttttttttcgaatatacgtataatcctgataaggataccaaaacatacagccccataatcagtaatccccaaactaaaagaattgaattggtatatcccatatcactttcagaaatttgaatactgaaacgataaataaaagaaaaaggaaagactattgagacatcacttgctaacagtatcgtcattattaaaaaggaagctacaccggttatcatgacaaccactagatttttacttaagaaagcaattaaagctgcaatcggaatggttagcaggctcaaagtagtagaagtaaaagatgtcgctattaatcttaataagtcgcttgctgagatatcttcccgaaaaaagaaaaacaaggtggataagtgaataatatgattaacagctgagattaaaaacaaaaatagaaaagctgcagctagctttgataatatcaatttgaatttatgatacggatatgacatccaattcaacattgtcctgtttttaaattctaaataaaaataaaaacctgaaaaaataaaaataatagtcggaaataggatcgaatactgattaaaaacaaacatataaaatttgttccaatctgtattttcgttcatagtcaaaagaccgattccgtttatgagaaatggcaaaaagcttagaaagaaaataacataaattgatttcagtcttttaagtttcagaaactcgttacgcactaacagactcatgacctttctcctttgccagcagttttaaataaagatcttccaaagatagcttaaatccgtcaatagacgccttgttaaatccccaagaatttaatttctctttcatttccgacggatgaattattgaaataaactcgaattgctgtttattctttgaaataacatgatccgcaaatttctcaatatccgcccaattaatacccgcttcagctggaattttgtacaaataaagatgttgcgtatttttcataaaggctgactcgaaaataatctgccccttattcataataagcaattcatcggccatgagattaatctcacttaaaaggtgacttgaaataacgactgtggttccatttttcattacctcttggatcaacatttcacgtacttctttaataccatatggatctaaaccgttcgtcggctcatccagcaaaagcaatgcaggagcatgcgcaactgctctggcaattcccagcctctgtttcattcctaatgaagtttgcgaaaacagcttatctttatgttcaaaaagtccaacctttcctaaaatctcatttatttcttcatcagaagctgatttttttaaatagttaagatgtaatttaatattctcaaaaagattcaaattttcataaaagccaggaaattctataatgcttcctatagactgaatcacatcattatttggatttccatataagtcatccccctcaaaaatcacttcacctgaagttggaggaaatatccctaacagaactttaagcaatgtcgtttttcctgcaccgttgggacctaataaaccatatattttacctttttccaatgttaaatttatatcatgtaaaatttctttcttttttatagaaacattgatacccttggatattaaagctggatcagcctttcccacttttcatcattcctctccgtcttgttctgtttataatataaacttacgaggttaaaaagaagatatagtcaaggttaatttacgtttaaatttctcaatataaaaaatacgtgaagcctctacggcttcacgtattcattgctgtttggataaataataaaaaccgttccgttttgattgctctttattttatgttcaagccccatttgtttaagcatcatattaatgatcgataagccgatcccggcgccttttctttcagatttataattcattcccgggcccctatcctcaattatgattacgggtttgttttcaattagctttgtctgtacggaaacgtattttcctgaatgagcatggcgcaaaacattttgaaaaatgttatcaagaattctcttcagccaagtctcgtctatttcccatacgatgttttccttcagatcaatatctattgtgaagtgctctttctcaaaaattggataccaagctgttaacgaagaacgtattatctttaatatgtcacaactctttttatgaagcggcaatttacctgcggcaagaagagaaaatgatgacaaattgtcaatcagttcgcccataaacgttattttatcgtttatgatgcctaaagaatgctttccattttcactgcttatttcattcttcaacgtaaatgtatgccctcttataaccgtaagaggggtccttaaatcatgagataaatcagcaatcaagttttttcggatttcgccttcttcacgctctttttgtctgctgttccttagttcctcaaccatctggttgaatgaatattccacttgacccagttcatccttctgtttaactgttacaaattccggtatgccgtcattatcttgttttttcatatgattccccaaagaaattaaccttttttgtattttcgcaaaaaacatccatgaattaatcacaaaaagtgaacagacaaaaatcaaggcgataaaccatatataggaatacttggccctcataacctcccattgagatcctataattgagcgcggagtttctaaaaatgcatatccgctgtcttcactcccatttacataagcactcagcaataaatatttcttttggttttgttccatcaatttaatcaattcgctaacgtgaataacctcaccctttttggccaaccgttctgagttcgaaaacatcacctttcccttatcatttatccatacaatatcagagtgtttatattgcttcatgtgcgggaaagcagacgtaatttcccgattggatttccctgaaaaaccttccacatcagacttccaatcactttccaacttgtttggttcatagtgtacttgcccctggtgatcaatcaagtatgttaatgtgacatagtaaagaaaattcacacctaaaaaggctatcggaaaaaacaaaattgaggcaacgatattaataaggtattttgttgataatttcattgtttaatcctgtatccaatccctctgatcgtttcaagaatttccggctcatttggattgatctcgattttttgccgtaaatgcctgatatgtaccatcaacgtcttatccccttcgatataaggctgctcccaaatattttcataaatttgttcctttgttaatatttgattgggatgtctaagcaaaagcaaaaaaatccttaactgcttatcagttaaaaatatttcctcatgactttgatgatttaaaattcttttttctttcaagtggacacttaagtgttttagcttcaattcatgaatggcagtcttgtcaaatcttcttaataatacttcgattcgagcggccagttcatcgggatgaaagggttttgtcacgtaatcatccgcaaatcctaagcctttcagtttatcttccagacccgttctcgctgttaaaagcaagagcgggatctgcggatgtgtttttttcatcctttgaccgattgtaaatccatctaaaccgggcatcattatatcaagcacgatcagatcagccttttctatatatgtttcgtaattataggaagaagtgagccatataatcatatagccccgatcttctaaatcatcctttacaaattggccaatttcttggtcatcttcaatgtataaaatgttattcattaggaccccctctgaaatatgtgactaaaaaccaatcttccataataattatatatattataaaaatctcctttatgtaaggcaccattccattattatagctcatagatattcacaattcatcaaggggcaaaacgataagtgaatgcgaaaaggcggtctgttgtcagatcgccttttcccttataacgtcacaccggacttaaagattgcaagctcccgaaaatcgtttttttcgttattgacgtattctccgcttgcaactttaataatgtattgaataaaatctctcacaatgtgatcttctgttgtttggtcttccgccaatctgcccgcattgtaatcaatccaatgaggttttgattgaaataaatcggtatttgttgatactttcacagtcgggacaaatgtgccgaacggcgtgcctcttccggttgtaaacaacacgatgtgacagcccgccgcagcgagcgctgaagaagcgattaaatcattgccgggcgcactgagcagtgtcaatccctttgttttcagtgtttcaccgtatgtcagcacatcagaaaccggtgcaagaccggctttttgggtgcagccgagcgacttgtcttcgagcgttgaaatgccgccttccttattccctggtgacgggttttcataaatcggctgctcgtgcttcataaaatattgcttgaaatcattgatcaatcggactgttttatgaaacacttcttcactcaccgcacgctgcatgagaatcgtctcagcgccgaacatctcaggcacctccgttaagaccgtactccctccctgtgcaatcaagtaatctgaaaatcttcctaataaagggtttgcggtgatgccggaaaaaccgtccgacccgccgcatttcaatccgatgctcaattctgacaggggaatctcctcacgtttatctccctttgccgcaaggtgtatctctttaagaagcgctgtccccgcttcaatttcatctgtgacagcctgtgattcgagaaatttcacccgatctccgttcacttcagaaagcgtttccttaattgccgccagctcattattttcacagcctagccctaaaaccagcacaccgcccgcatttggatggcgaatggcgttaatcagcatttgtttcgtattctcatgatcatcgccaagctgggagcagccgtattggtgctttaaaaccagcacattgtcaaagggggcaatgtctttcgcctcttttacgaagcgctgcaggattttctcagcgacgccgtttacgcagccgactgtaggcacgatccacagttcattccggacgccggatgtaccgttttctcttttgtagcctttaaatgtccggttctcatttgtaaaaggattgtcctcgaagcgcggtgaatacgtgtattcttgcacatcggataaattcgtttgcagattatgggtatgaatatgctcgccggccgaaatccgccttgtcgcacgcccgattgaaaaaccgtatttaatgatgctgccgttttcttcaatggtttgcagcgcgattttatgcccccgctttacagggtccttcacttcaatcgccagtccgtctgtatacagccgctcccctttgttaaaatggcgcatagcgagaagcacgttatcgtttttatggatttttatgacctctttcatttcacttccccccttattgccgcagcattcatgtaacgcatgcttcatcccccgcttatgaatgacagagagaaaaaaagccgttcgttcagtcagccccggaagatggttcagattctttccccacaatcgctcttctcctaatatagaaaatgccgcttgaaacatatcatctttgcaacgggaccgcgccatttgaaaacggttcagaacctcctcgccatctgccggtttgttcagcccgttccagtatgaatagatcatggcgctgaatgaaaataccagcctctcaggaagccggccctcctgttcgatataagccttcagcgtcggcaggtttcttgttttgaatttcgcggcggcgttaagggtgatgctttgcagataatgttggatataagggtttttaaaccggtgtaacacatctgccgcatactgggtgacaccctccatttgcagcacgggaaggatttcttcattgatcagctcttcgatgaatctgcccgtcacctcgtgctcagccgcttcccggacggttagcagtccgtataataaagccactggcgccaatgccgtatgagcgccgtttaagattctcaccttttttgtcctgtaaggcgtaaggtcagacgtgatcagtgcgttcagcccggcatcagcaaaaggaagctcattctgaagctgttccggcccttctatcacccacaaataataatgctcaccgaccacaagcagacggtcttcgtatccgagaaaatcggtaagttcttccgcggtatcaacaggaaatcccggaacaatccgatccacgagggtattgcagaagatgttcgcatcatgaatccattgagtaaaatcaggctccagctcccacagcccggcatattgaagcacggcagccttcagtttccgtccgttttcttcgaccagttcacatggaagcacaatgcaccctttctcggcgtcacccgcaaatgccttatagcggaaataaaggaacgccgctaatttcccggggaatgttttttgaggcctatcctcaagccggtcgcctttctcaaacgtgattcccgcttctgtcgtattggagatgataaaacgaagatcctcttgtgctgccagccgtttaaaggaatcatagtcagaaaaaagatcaatgccgcggctgatggatttgacgatcgtgtgttcttcagccggttttccgtcctttatcccccgcaaaaaaagcgtaaacaaaccgtcctgttcgtttaaacgttttattttctcagagcctctcggctgtacggcgacaacgcttccgttaaaatccgtcaattgattcaattgatcgatctgccagtcagcgaaggcccgcaaaaagttgccttcgccgaactgaaggactttttcaggatattgaatgtattttccgcacatctttttattcagctgccgcaagctgtccgcctccttatatttatgcacacgttaacattctcccgtacaaaaacccggataatcagacgggccgttatgtgagttttttaattgaatctcttatcatcacctcggtgttttcgtatattttttccgccgccgtatccgggtcggtgataagcgccaaaattttctctgcgccgagtatgctgattttttcaaccgggcgttttactgtcgaaagcctcggcgtcatgtattgggaaatgccgatgtcatcaaacccgataacggaaatatcttccggaacgttcaggcctttggcgaaaatggtattcatcgccccgatcgccatatcatcgtttgaacaaaaaacagccgtaggcggtgattgaagcgccaaaagtttttccatcgcctgactgccgctttccatatcatagcggccttttacactgtattcatgcttaatcgggatagaatgatcaattaaagatgtcaaatagccttctttccgctgagaagctgacctgaatccttcctttccctcaatgatcgcgatatctctgtgtccgtttgcgatcaggcagtcgaccgcctgtctggagccttctttatcgtttgacaggatattcgtgatgctccggtcatcaatgtcccggttcagcacgacgagcgggatgtttttctcgcggatatgataaataaatgaattatcactgtcgctttggctcattaaaatgattccgtcatatctcatgggcgtaatggtttcaaagcttttcagatcgtcaatcgcgcggacgaacaaattgtattcctcactgattgtgcggtttacacctttgatggtatcggaaaaaaagctgtgtgaggttccgtttgtgatgcttgtaaaaaacagtccgatcgtatgggacttttgcatggcaaggctttttgcatttacattcggtgtgtaattcagctgtgaagcgagctctaatattttctgttttgtatgctctttaatgtaggggctgccgttaagtgcccgggatacggttgtgtgggatacgttggcgagttttgcgatatcttttatggttaccatcgtttttcctttctttctgtatgctgtcatttatttctattgtaccattaacggacagtccataaaatcactaaagttgaggttttgcatgatgtaagtcctgaacgagctcgtcatgctgccggtccgtcagtttatacattaaaccgataatcagcatggcgcacgctaaagcgaaagccgggtacagcagcagaagccctttaatcccgattaacgtgccttttgtctgagacgcattcgggatatagccgataacgctcagcccgatgcctgaaagaaaacctgataaagattgggcgagttttctggagaagttgaaaagcgaatatgtcgtcgcctccttccgttcacccgtcttccactctccgtaatcaataatgtccgacacaagcgcccacgtaatgccgtttggtatactgatcccgataaaagcaatgctcgctaacgccgtaaagatatatacatttgacgggagacagaaattcagcgcatcagccgcggcgctgacggcaaaaccgatcatcaccgtttgcttttttccgaagcgtttgacgagtttcggcataaacaacacacctaaaaatgaagagccgatgatgataaaactcatgtaggacatcagctccgcattgttgagattgtattgggcgaagtaaacaagcatagcggatttaatgttgtatgccgatattgagaaaatcgtcatgaaaacgacagtcagaagcggtttgttgccgataaagcatttgaaaaccgacatgacggacagcttttctttcggcgcttcacggacgataattctttctttgcagtttcggtagcagatcataaatcccgcgattccgattacggccatcattcccatgactgccgggtagccgatgtgaacgttatcaaaatgaacgagaatcgggatgacgatgacacttgtaatgagcagcgcgccgagagagccgatctggcggaatgcggaaagcgccgttctgtcctccgcatcctgtgtaatggctgcaccgagggagccgtacggaatattgacgaaagaataagcgaccccccacagcatgtaagaagcataggcgtacacaagcttccaggtgacactcacgtccggtgacacaaaaatcaatacggtcatgaccgcaagaataatacttccgaataataagtacggcctgaatttcccccggggtccgatcttttttctgtagtcaatggccgagccgacaatcggatcagtcaaagccgcaaacagcttgctgaccaaaaaaatactgccggcgaacgctgccggaatgcctgcgacatctgtgaaaaacttcagcaaatagatctgcccgagatcaaacataaatccgttcccaaaatctccgaaaccataggatactttttctttcagactcagcttatgctccttcacttttgcggcaggtgctgtcacgacaggcacattactcataggccacctctttcattccattttttaaaagcggaaatattcctcagcattccggtaacaaattccctcgacaatcctccctaaaagctccatatcgcagggcgcttcgccttgttccgcccagccgccgatcagcgtgcagacaagccgcctgaagtattcatggcggggataggacaggaaacttcttgaatccgtcagcatcccgataaaccggctgaacaggcctgtgtttgataacgctttcatttgttgaagcattccatctttcgtgtcattgaaccaccaggctgtgccgaattgaattttccccggtgttttcccatcctgaaagctgttgatcatgctggcgataatatagttgtcattcggattcagagaatacaaaatcgttttaggcaattgccactttttttcggcggaatctaacagccgggcaagcggttttgcgatacattcatcattaatcgagtcatatcccgtatcaggaccgaggctgctgaacttatttgtattggtatttcttaacgcgttaatatggaactgcatcgcccagtccagttcggcgtaaagaccgcaaagatattgcagcgtccgtgttttgaatttcttttcatcttcaaaagacacatgctctccgcttaatccggcggcaaaaatccgggccgcttcctcttcggtcgtctcggcataaaccatttgatctaatgcgtgatccgacactcttcccccggcattgtgaaaaaagcggacgcgggattccaacgcatccaaatacgattggtaggtggtgacagccattccggaagcgctctccagcgaccggacccaatcggcaaaacccgggctgctgatgtccagacctttgtcaggccgaaatccgggcagcacttgaaccggaaaatcactttctttcaacatttcatggtatgtcagcgcatcggcaggatcatcggttgtgcaaatgactttgacatttgatttcagaatgagatcccttgcgccaaacccgtctccctgcaggagctcattcgtatttttccaaattgccgcggccgttttttcattcaatacgtcataaatgccgaaccagcgctgcagctctaaatgcgtccagctgtacagcggattgcctatcgccatcggcaccgtttttgcccaggcgaaaaacttctcttcatctgaagcgtttccggtaatgcagcgctcttcaatgccgttggccctcatgatccgccacttgtagtgatcaccgtaaagccatgcctccgtaatggttgtgaaggttttattttcatagatttcctttgggcttaagtgacagtgataatcaatgatcggcatgttttcagcgtattcccggtacagcattacggccgttttactatccagtaaaaagtcatcacccataaaagctttcacactctcatcctccctcttaaaaaatgttaacgttaacaaaatggttcttttttattttagcttcctctttctcacatatcaatcatttttattttatttttcagaaaattgtatctattaacatttttatgcaaaaaaaagacattgccgagaaaagtccggcaatgtcttctgtatgatcttaaggattagtaagcgaggctgaataatcctttgatatgtgttaaataacgtacgttacttgcttctttcattaaagatgccggaaggcctttcagcggagtagagttcgctccgatgatggcaaccgcgtctttacgtccgaggcttgcaagcgtaccagagtttacaggcttgaatgtttcaagcgtttttccttctaagtaagcgaacaggttgtaaccgacaagttcacccatctgccaagcgatttgcgctgtcggcgggtacggacggccgtccggcgcaaagtatacagcgctgtctccgacaacgaatacatcttcgtgagaagtagattgtaagaaatcgttaaccgtcgcacggccgcggttcacttcaaggccggattcgccgactaacgggttgccttgtacgccgcctgtccatacaaatgtgttggcaacgacttttgaaccgtctttcagatcaataacgtttccttcaacatttgtaacaggaagacctgttaagaactcaacgccgcgtttttcaagactttttgtcgcgcgttcgataaggtcatcaggaagaacaggaagaattttcggacctgcttctactaatttcagtttgatttctttcgggtctacgccgtattttttcgtaaggttcggcatgatgtcagcaagctcaccgacaagctcgacgcctgttaagccgccgccgccgataaggatcgttgcatcagcttcgtttttcgttttagagtattcacgcacacggtcttccacgtgtttgtatactttgttggcatcagcagcagatttcagcaccatgctgttttcttcgagtccaggaatgccgaaataagccgtaacagaaccaagtccgacaacaagcgcgtcataagtcagcttagaaccgtcagaaagggcaacttctttcttatcaactgagaaagaattgacttctgcgattttaatgtcaacgtcttttcctttcagaagtttttccagcggcatagcaacagcctgttcagacacgttgccggctgcaaggcggtgcagttccgtaatgatttggtgagtcgggtatttgttcacaacggttacgcgtgcttcatctttactgtaatgtttgcgaacggttaaagcagaaagaactccgccgtaaccagcgcctaaaatgacaatatgttttgacatcgtatatcctccgtcctttatatcaatttgaatctgagattatttttgtttttcgttcatgatttcaagatagctgttagcaaaacggaacagcttttgagcttgaggatctttcagcatgcgcagcaggccgaaaagtccgatcgtttcattgcttgcatccgcgcggtcttttgcttcgatggcagtagccgcaacttctttcgctgtttctttcaccggctcaagaatttctgtaagcgcacccactgtatcgctcttcaatacttcgtctgtcgctacagactgtgcaaaatcataagacttcgttaaaatatttactaactcagtcagttttggaagctgatccactaaaacagtcagtgattcttgaacttcaggttttagcagctgatcaataagatcgcgttggccttggctgacagatgcatttgtttgatcgattgtttctggcatatccgattctcctttactataagcagtatgctgattttttttggaaagggtagcctttcccccttcatgcagaaaagcatgaaaaagcaagattgtgaattcatgcacaatcatttacaaaaataaatgtttactacccagtttttcactttgccatatccagtattatttttatatcaacaaaaacaattgaataagtcaaaatttctttttcctctctgaaaatagcaaacataaaaaaccccaatttgatttactcttatataataacactttttgaacaaaatttgaacgtgaattgtttcgtttatgaaattatttatatggcgggggtgtaataacgtttcttttaggctatttttttacagaccgtccgcttttcccctgtcatttttcccacaattctaaaagcgggcccgattttcccgtaaaggggtcacattccgggagcgggacacggctgatttcttctgaagttctatcatttttctccgtttttgtatcgtactgccggccgcccggataagccccgatcacggtaaaatcagaactgcccgacagttttttatgtccggtgcctgccggaatgaccgctgcgtctcccgtttgaagaacggcgtccgccccttgttccccgccgaacctcaaaaccgcggttccttttaccgcgacaagaacttcgtgcgtggtgctgtgaaaatgatgatacggaaatactccgcccgtccagctgttagaccaatcgtgccggcggaggacggactctgctttctgtaccgtttcttcattaaataccgctttataaataacaagcggaagattcgggttattcggaatgcggccgtcaccttcgaaataaagcacttgaatatcctctttctgcattgtgttcacctccgtatatgtctgtttcccattcatcatttattaaaacgctattttctcatattccattgcgaagcctgccggtgaatagtatagtataaaaaaatatgtgtcaaaatgagggatttaatgaaagccatcgtgatcggaatattggcatctctgttttttgcagtcacatttattttaaacagggcgatggagctttccggcggaagctggatgtggagctcttccctgcgttttctttttatgattccgtttttatttttgatcgtttatgcgaaaggaaaatgggcgccgctctggcatgaaatccggaaaaaaccgtttttttggctgaagtggagttttaccgggttcgtgcttttttatgccccgattacgtttgcggcggcatatgggcctggctggctgatcgccggcacgtggcagattacaattgtcgcgggtgtgcttctgtcgccgtttttctgcgaaacaaaaaattcaccggcgggcccggtttccgtcagacaaaagatcccgctgatttcgctggttacttccgtcatcatcctgatcggagccgggctgattcagcttcagcatgcgggttctctgtccggccgcacgatactattcagcgtggcgccggtcgtcgtcgcggcgtttgcctatccgctcggcaaccgcaaaatgctggaacaatacggcggaaaactcgatacgtttcagcgggtgctcggcatgacgctcgcaagccttccgttttggcttttgatcgccgctttcggctggtatagagacgggcttccctcaatgggacagacattccaatcctttatcgtcgcactcagctcgggcgttatcgcaacagtattatttttccgcgccaccgatatggtgaggaatgagccgcagaagctcgctgctgttgaagcgacgcagtccggagaggttctttttgcactgatcggcgaaatcgtctttttatccgcggcgtttccgtcacttctttcatttgccggactgttcattattattgcgggaatggtcatgcatacattcgcttcccggcagacagaccagaaaacggcggagcaaacgtcagccaatctcaccggttcctgattttttacgaaaggtgtcatcctatatgaaagaagaaattccggcaatatcttttctgtcagccggcaaacgctttgaacaaaacaatacgtcctttgatgtcctaagccgtgtaaccggacatatccaaaaaggttctatcacggcgttgatagggccttccggcgcgggaaaaagcacattgctgtcactttgcaatctgatgaatacacctgatgaaggggaagtgcttgtattcggaaaagaaataaggcgctgggatatcagggagctcagaaaaaccgcgggccttgcatttcaatcagctcccgtcacggagggcacggtgcgggacaaccttctgctcgcagaaaaactccacggggcgcagcactatacccctgaagagctcgcagattttacagaccttccgcgcgggcttctggatcggaatgcgaaagaattatccggaggtcagcggcagaaactctcattagcgcgaactctcgccggactgccgtccatcctactgctggatgaaatcacctcggcgctcgactcctcatccgttctcaccattgagaaactgattacgaaactccatcggcaaaaacagctgacaatcctgtggatcacccataaccttgaacaagcagaacgattatccgatacggtatggtttatggctgagggacggcttttagagaccgcggaaacgaaaacgttctttaaggaaccgaaacacgaaaaagcccgggcgcttttacaagggagcgggtgctgatatgaatgatctttcactgttactaacaagtatatttgtcattatcgctttattcctgtctaaatcttttaaagccggtgtcgaaaaggatatgatcgtcgcaaccgtcagggccgtcattcagcttctcatcatcggctatgtgctgtcgctgatttttcgcggtgatcacccgatatttatcatattaatggtgcttctcatgctcacggccgcttcgcacaatgtcgccaaacggaaaaaaatgcggatcggctcattttggcgcgtttttctgacactggcaatcgcggaaaccgtgacgcagggacttttactgacccttcacatcattccgttcacttcaagatatgtcattccgataagcggcatggtcatcggaaactccatggtgctctcaagtctgtttttaagccggctcagttcggaagcagacctgcggaaagaagaaatccagctgattctctctctcggaggaacgcctaagcaggccgtccggcagatattgacgtccagtatgaaactcagtatgatcccgacgctagaaagccagaaaacattgggtctcgttcagcttcccggcatgatgacggggcagattttagcgggggctgatccgatacaggcggtgcgctttcagctgctgatcgtttttacaacgatggcctccgctcttcttacatgcatcatactcagcgccttgacatatccttcccttttcacggaacactggcaattaaaaaaattcagcagggaagcgtaagcttttttccctgctgaatggtggtttatgacaaggtcagagattcatagtaacgggataattcaattatcatcgctcccatccgctcaatgtccggagcaaggaccctctttaccccttcatcccggatcgcttcagccgtcactttgccgactgcggcggcaagcacatgtttttcgaatgcctgctgcaattcttttgcggatcctttttcttttgcataatcaaagagagagcgcacttgaatggctgtcgtaaaacatacggcatcgacctctccgtttaacagctctcccatcagtttatcgaccgtctccctttcaggcggaatatgctgatacggcagaacagggaatacctccgctccgtttttctcaaggaactccgttaaaaccggcgctttttcgccatgaagctgtatcataacttttttatctttaaagtcaaatcgttccaaggagcggatcagccctcttgttgtaccgtcttcatctgaggcatgcggcgtgatgccgagcttttttaaggccgcatatgttttatagcctctgcagccgattttcgcttcatgaatggccgctaaaaattcttctttcagaccgattttttccgataccgacaataacgtttccgtaccgatgcctgtggtgaatatcacccagtcggctttttgctcggcaaatgttcttacgtcgggttccatttgatcctccgccaggtatacggttccttggagggaacggatgaccgccgttccgccctgcttttctattaattttgtgatctcttctgttttccgcgaaccgccgatggcaatccgtttcccgttcaatccttttcccatcgctgttttcttcttcccttcagatgccgggcgccctatggcaggccgtcatttatttctattattgttacgcaatcagacgggaaaatcaagctatgctcccgttgaatcccccgtgcagttgctgtatcattaaccggacagaacgatttgattcgcggagggactttcaatcatggaaacaaaaaaagagttcgagacaaaaggatacgatacttcggtcatttatgagttcaatgaatatcctgatgttcacagcggccgatgtgacaattgcgactacacgctgtttaaaagctcagtgaagggcggaaaatttttgagggaatgccggagatgcggcatgaagaaaaacatataacaaaacaggcagccgtccggtgctgcctgttttcctaatcaattttcgacggacgccgttttcaaaaattcttcaatggcgcaaacagcctgttttggaccgccggtttcttttattttctgctgcatgcttttcacgcggctgagaatgtttttatcgccgtatacgttctgaacgtctttttgcagacgggccacagtgacttctttcagcggcagatgcacgccaagccccaattcatccacacgctttgcggtgacctcttgttcgtgcatttgcggaacgacaacgagcggaacacccgcattcatcgcctccattgtactgttcatcccgccgtgagatacgaacagctttgctttctccagcacatcaagctgcggaacgtgctggcggatgataaagtgatcgggcacatccgaaaaactttccggatcaattgttgtgccgactgacataataacccgccagcccgagtcccgaaacgcgtcaatacacatccggtaaaattcaggccaggcgttaaacgccgttcccagtgagatgagcataagcggacggtcatcggctgcatcaatttccagacttcccgtatttgtgcgttccccaagagacggacccgcaaaacagaatcgttcatcaaaggtttcctgtttcggctgaaaggcccttggcataaagacgatattcaatttttcaggcatgaaaaattcttccattgtcatccgtttcacttgttcattttcaattttctcctgatattcttctatcgcctgtttggccgcttccatcgtttcttcgtctcttcctaattgaaaatactcattcattgcataactcgggcagaactttacggccgggatgccgccattatccgcaaacaattttccggcaagcgctaaaaaatcaaacaggacgatgtcaggaaggtcgtctttgtacagctcttccagctgcggaagcacttcaaccgcttcttccagaaacatcacaaacgcgtcacttttgtttacccgttcttttatcgtcttcgggtccgcctttatgcttgtgcggtataaaacgggaatggcacccgttttggcaacggaagcttcaaattcctcagtcgtagcgaatgtcactttatatccgcgattgacaagttcctcggctacaggaagcgtgggattgacatgaccgtgagcggccacattaataatggcgatgtgtgtttttctcatcttttttcttctccctcattttcgtttatctcggcttctaaagactccagcccgtacatgacactgtttcggatcggctcaatccgaacgggctcaaggtgtgaaaaggcttttacaattcctttcagtgcggcttccgcttcaagtctggcaagcggagcgcctaagcagaagtgtacgccgaatccgaaggaaaggtgcggattcgattggcgatggatatcaaatacgcccgccttctcaaatttgttttcatcacggttggcagatgcaacgtagcagagaacgatctctccgcttttcaagcggcgcccgcgcagttcagtgtcgtgccggaccgtccttctgacaaacggagcgggagcgcgaaaacgcagcgtttcttccactgtttgcgcgatgagagaagggtcctgtctcagctcttcataaaggccgggcgtctctaatatgctgtaaaccgcatttgaaatgagattagtcgttgtttcatttcccgccactaaaagcaggttgcaaaacgggatcagatcttctggcgtgagcttctctccctcttcttcctcttttatcaaaatagaaataatatcttggccgggctgttttcgtttgctttctattattcccgcaaaaaacgccgccagctccgcctcacattggtcacgttcctgctgatttttctccgccgcttcaggactcgcatctttcggcatgctgacgagaatgtccgaccattttttaaactgatccatacgctcggacggaacgcctaataattctgaaatcaccatgaccggcaaagggtaagagagatctttaacgatatcaatccgccctttgttctttgcctgtttcaggagatgatcggtaatgtctttaattctcggctcccattccttcaagacacggggagtgaaagcgcgattgacggcagatctgatttgggtatgtttcggcgggtccatattcagcatggactttgcaatcgagcttttcacatcagtcatgcggcttgagaacgtctctttatcactgatgacttttttgacatcatcgtataaaaacacactccaaaccttcgtttcttcatcaaagtatatagggctttcacgtctcattttttcataccaaggaaaagggttgtatacgtccaggccgttttttcctttcatcagggttctttggatggcttgtctcgtgctcctcagcttactcatgttacatcactcctgattgtttcatatttgaatagttgacgtaccttgaattttatcctagcacatattttcaatttttttctattcataaccttaactattaacataacacaacaaaagtcatgaatccggaggtgaaatttctcccaagaaaacagcagaagcgcacaaaaaacccgagccttcagccaggctcgggagaaatgttcactcattcgtctgcggtttctggtgctgcttttggtcttcaggaggctgcgtatttctttccatatcgtccgtatcagcgcccatgcctttcaggaaagaaaacagcagagtgacggccttgttgatttccgggtcttttaaagcgcggacgatatcaaaataacccgtcttcctgccgctgtctttttcttcgacggcctttgtgacgcccgcattgattttaacgataaacggctcaagctgttttacatcgagcatgccgagaacgccgcttaacagcaggagatttttcagcatattggccgtttccggcgtattcgccttcttcaccaggatatccatcactttgtctccttggccgaagagcccgcgcagaagcgccaaaacgccgcgctcgttcatgtgctgaagaatgtgcagagattccaaaatcgcgtctttatttcgtaaaagagccgtctcgatctcttctaagtccttttttcgtttgtcttcttctgtgacggtctgttttcggatgccgctgattgctttagccattctgctgtttccccctttttacggcgtctcccggaaatacataatcttgacgcgcccatttccgatcaacccggacaccgatctgcggctgcgggtttccgtaacggaaattgattttcggaagcggattaacgccttcttttttcaaaatctccatcttcgctgatgtttctttatatgccggtgtatcggtatccttatccgcatagctgcttgtcaaaaggttaatggcggcgtcttttgaatcgttcatcgggagatagacttgtttgccttttaccctgtctgtgatgacgcatttgactttcacatttccgtacggtgatgtcagacggacaagcgttccgtcttccagccctctttcttcggcgagttcgggcgagacctcaaggaacacactcggtgttttttcggatattccttttgatcggtaagtcagattcccttcgtgaaaatgctcgagcagccgcccgttattcacatggatatcatattcttcatcaaattctttcggctcggtccactgaacgggatatagaatcgctttgccgtctgaaaacggaaacttgtccgtaaataaaagcggtgaatcggttccgtccgctgctaccggccattgcagtgaattgtagccttcgagacgttcgtaagtgacgcctacgtagagcggcgaaagcattgccgcttcttccataatgtctgccggatgttcatagcgccaatcagcgcccagccggttggcgatgtccgtaatgatctgccaatcaggctttgaatcgcccagcggttcaaacacttcgtaaaggcgctgcaccctccgttccgtattcgtaaacgtcccttctttttcaagactcgggcttgccgggagcaccacatcggcgaactcggccgtccgcgagagaaaaatatcctgcacaacgaagaaatcaagcttttcaaaggcggcatgaacatggttgatattggagtcgacaagccccatttcttccccttttacatacatacacttcagttttcccgagtggatgccctcgatcatttcatgatttgtcattccgatttctttcggcaggtctgttccccagccctgttcatactttttgcgggctttttcatccgttactttttcatagccggggaagctgtcaggcatactgccgaaatcactggctccctgcacgttattatggccccgaagcggatatgagcctgcgccgggcttgccgtaatttccggtcacaagaagcatgttggaaatggccgtgctcgtatcacttcctccgatatgctgggtgacccccatcgcccacagtgcgcatacgcttttggcttcatgaatcatccgggccactttaattaaggtatccttgtccacaccggtatgtttttccgcatattccatcgtataaggttcaaggcttttcacgaattcatctaatccgttcactctctccttcagaaatgcagtatccgccaaatcgtgatcaagcagatatttcgatacggcattcagccagacaatatctgatccggcacgcggctggaaaaacacgtcggagcgctcggccatttcatgttttcgcaagtcagcaacgacgagcttctgtccgtgcagcttatgagaacgtttaatgcgtgtggacaggacggggtgagactcagatgtatttgaaccgataatcagcacgagctcagctttttctatatctgtaatcgaccctgaatcaccgccgtatccgaccgttctgaacaatccggccgtggcgggagactggcagtagcgtgagcagttgtcgacattatttgttccgataacggctcttgcaagcttctgcatcacgtatgattcttcattcgtgcatttggaagatgtgataaacgcaagcgcgtccgggccgaaatgttcttttatatcggtaaatttatcagcgatcagctgcagcgcttcatcccattccgcctcccgaaacgagtctccttcccggataagcggtttggtaaggcgcttttcactattgacgaaatcccagccgaatttccctttcacacacgtcgaaattccatttgcgggcgcctcagcctgaggctcgacctttaaaatgtctcttcctttcgtccatatatcaaaactgcagccgacaccgcagtatgtgcatacggttttcgtttttttgattctttcatcccgcatggccgattccatatccgatatggctaaaattgatccgtatccggtttcgacgccttttgtgatatcaatcatcggccgaagcgtctcttggttaatgcctgttaaatacccagcttcgccttccatgcctttttccatcatggcattgcacggacataccgtcgaacaatgtccgcaggaaacacatgatgattcattgatcggcacatcctgatcccaaatgacccgcgggcgtttccgctcccaatcaatgcttaaggtttcggttacctgtacgtcctgacaggcttcgacgcagcgtccgcacaaaatgcactgatcgggatcatatcggtaaaacggatttgattcatctttaggatacggtttttgatcgaacggaatgctttgatgattgattttcatttcctttacggtattatgtatttcgcagctcccattgttgtaatcacagaccgtacagtacaattcatggttgtgcaaaatgttgtccatgccgataacctgcgctttttttacatcggacgaaagcgtatcaatgacatctccgtcctttatttgcgcggaacacgaacgcaccagttccccgttaacattgacgatacaggtatcgcacgtttcaatcggcccgagactcgggtgataacacacgtgcggcacgtcaattgaactattgttcaaaagctgcaaaacggtttggccgtccggcgcttccatttcaaccccattgattgtaactttctttgtatcagccattttctttcccctttctgtacccctctatacatcctctatgattcccaaccggcctttcactaaaacatctcgtttatctcaggaaacatacgggtatgagcggtaaaaaggaggcgttcacatgttgaagaaaaaaacactcgtcacgggattatcggcagtgatgctcacgggatgcgctttcggagcagaagcattttcggatacacagcccgtccatgccgcagccgcttcaaaaacggaaaaccagcgtgcacaagaactggtgaacagcctttaccaatcggcatttaaaggggaaatgccgcaaaatgtgaaaggcctgaaaatcaaccaaagcacaagacaggacgtttacaataaaatcggcgagccggaacaaaaagcagacagccgcaatccatttgatttatacagctggaacatgggaaaccccgggtatggattttcctatcataaaaacggaaaaatctcggaaatacgctattttggaacgggggtcgagcggcgcttaaacctcggcagcgtcacacctgacgtcttaagcaaacaaatcggcagcgctgacaaaatcctgacagtgccagaaacgggcgaaacagattacgtctaccatacggggcagtatgagctccgcttcgtcatcggcagtgatcaaaaagcagatcatgtcaacctaaaagccagataacgcaaaaaagcggcctcccgggccgtttttttcatagacagcttctccgtcgttccttacaatacatgggagtacaaaaaaaggggaacagtgtgaagtgaatagacatccattgacatacggaatatgtaccgtttttatcatcgccctcggtttgctgtccagaaccgcatacatcaccgccctattgcccggcatcataaacgcttatttaggagatgccttgtgggcggccatgatttttacaggattcgggcttttcttacggcacatccggacggaaacagccgcaattttgagcctctcgttttgctgtctgattgaatgcagccagctgtatcacgcgccatggattgacgcgatcagaagcagcacgctcggcgggctgatcctcggctggcaatttgtctggagtgacattttcgcctataccctcggggtatgcgctgccgcacttttagaatgggccgtaaaaagaaaccgccagccctcttcataatcggagcacgccgccgatatgaagggataaggaggtggaagctatggatatccctgcgttatcaatcgcaatgcatcagtcatctctggcgcagaatgtaaatatcgctttaacaaaaacggtcatgcagcatgcacaggctgcggcggaagaaacagtgaaaatgctgccgtcccagcacccgactgccggccattcaattgatgtgaaagtgtaaaaaaagatgccggatgataaccggcgtcttttttttgcccattgtacatacaccgtaccgggcatacaggaataaggtaaacggaaccaacatttgaaaaggaggttttcctcttgtacgatcctttcgatcatgaatacacagccgagagccacgaacgggtgccatatcattatccgcggccgccttattattaccccagaccatatccatactatccgcggccgccttattattaccccagaccatacccatactatccgcggccgtatatcccgttctatccttggtattaatgtttgaaaagaaatgactgcagacaggaggcttcccctgtctgctattcaactttgaccgacaggatatacgggagggcttgaactttctccattaccgctgctttcccgcttttgcttttcacccttcccttcacttcaagcaccgccttattcaattcataggacgtaatcagaattcctttttcctcaagagaagttaaaatatcatgcatgacggctttctcttcaatcctgaaactgacagacaaagaatgcgccgccggtttaaacagaaaatttaacagttcaagcccgattaacgccaaaatcgtgccgctgatgccgatgacatacatacctgccccgatcgtcagcccgatccccgacgtagcccaaatccccgcggccgtcgtaagcccccgcacgacatgccgctgcaaaataatcgtgccggctcctaaaaatccgacgccgctgacgacctgcgccgccacccggctcggatcaaaggacgtatggctgttggataacaaatcaaaaaagccgtatttggaaacgatcatcatcaaggcgctgccgacggccactaaaaaatgcgtcctcaaaccggcttcctttgccctgaattctctctccaatccaataagagccccaagcagacccgcaaccgccagacgaatcacaaaatcaagttccatccgtctctctcctttccttatcttcttacccgcttttataacccaatcatgcggtgtatctttttttaaaatgcaccgactaattgacataaggaggttttatgaaatatattctgtggttttttatattattgttatttagcttatttattttgggaggatataaagcagctgtttctcaccctgatttcccggtgccattattcgctatgcacactaaaacaaaggaatatgaaaaaggaaaatacgtttcaaactatacataccgtttcgcaaaagaagaagaaggtccgagcggtttataccaattggaaatagccgaaaaaggctggaaacttaaagggcaggaaggacttatcaaaacctatgaaaagcgaggagaacgtgtttcactttttttcggtacgggggaaataagcgtcattgaagaatgatccttctcaaaagacaggctgaaatccgcaaacggcatatcttttacgactcccttatctctgcgaatctataaattcagccaatatttcaattaaggcgaacacctttctgatgcaaaaaatgccgccttcaatgagaaaatcattatacaaaaacaaaagcgcaactgaaaaagaataagcacctcataaaaaaagccctctttttaaaaaagagggctgcagaaggaaaacaggtaattatttatctaaagtgtactcactcacattaaaagtaagaatgtttccaaaaacaatatggtcccttctattttgaaaaggccctatattattatagtgcttctcgataacatatctagataagcctattccagaacttttttgatcataccatctgataaaatctttaatctcttccattgaaagatcaaattctttctcaagacctgtggtcattgtaacaagaagaattgcccgattactggcgggctgtttatttggtggttcctcaggattctttggttctccatctttatcctcttcggtttttaccggagtaagagcatgcagatattctaatgcatatccagacggcgttagaccgccaaaaagataaagattgtctccaactgcggctattctggcatcatatctttcaaaaggatagggtttttctacgctaatttcatctttaattggatcatatacttttgttaaaggctcaatcacacttggattttttctaccgccaataatgtaaatcttattattaaggacagctgtcgaagtattttgcaaaggtcctaaaaattttttgcgattccatctatccataacaggatcatattcgtaaatatattcgtttagatcgcttctgatatgtccttgaactacttctttagtttgcccgccaactaaataaatctttccgttaaaaacttcagtttctgttgcatatatattaattgggggcgcttttttaacactccaagttttggataaagtatcaaaagcataatgttgcgaatgagcagcatcggtgtcgaatcccccaatcaaataaattgtatcgttaataacagcggctgatgcatggcaagtcggggtcggaatatcaggtacacgtccccatgtatttgttttagtatcataaacatctacagagctgtaaacatttgctcccttataaccgcccaatacataaatataattacctatcactgctgtgcatgaacctaccctgggtgtgggtatatctaatccttgcgtccatttttgacttatggtgtcaaaactataatttttgttatatttttgattacgtgcacctcccaatacataaatagagttacccacaactgctgattcaaaagcataattaggttcaatcatatcaagtaatcttgtccacttgtcatatttctctgtcaatttattcattcctctcatctttgtgataattccatttatagatggcgatcgtatgacaagagattcatttaactaagcgatccaagatcacttactttcgatcaaagaaatattgaaaaaggcctctggatttaaaagtgatttggttttcacttctcggttattggccaacagtttactaaaaatttagtatataagtgtaatatagaataacacctctcaatgaatccttaatgaagctcataatagcttcaaccaaaggcatttcacattaaagtaaagatcactctcaatccaactgcatctctcaaacagaatgtccggcaatcacctcaaaaaacgaggtgaaatctgtcagtatcccgtcacccgccagctgtttttcttcaaatagcgcgcggttttttccgtgcgggtcaatggccataatcttgcccgcacctgcttttttcgccgctgtgagccccgaaaaggcatcttcaatgaccaagcattcttcaggtctgaggcctaacttttccgatgcgatgagaaaaatatccggcgccggttttccggggaagctcccgtcatcaaacgtgactttgtcaaaatcaaaccactgatccaaatgaaagacgtcaaagtaaaactcgacattttcctttaccgtagccgtagcgatggtcatcggcgtttcagattttttcagatgattcaatacgccggtcagtcccttcgtcagctttaattcgtctttgttttcaaggcataattctctgtagtaagcttctttttcaaaagacagcttcctgatttcttcatttgttaaatcgccggaaataaaatacgtcaggatttcactgtttgttctcccgtgaatgttaacgaaaatgtcttcatcagaaatggttttcggcgcgtattttttcaccatgaaaaaccatgctttttcgtgcagatgcgaatcttgaaacatcgtgccgttgaaatcaaaaataacccctttcatcgaaccgcccgccttttttatttttttgcgattttgacatctacatattgctcgtaatgaatttgaacatctttcatgactttatcatccgtaatcagatagtccatatcgtgcaagttatagaacacgtaaaaatcttcccggttaaattttttattatccgccagcaaaaatttcgtccgcgaattattcagcgcgatttggtgagcttccccttcttcaatgctgtaagaagaaatctcatcattatgtatgccgttggcgctgatgaaagccttcgtaaaattgaatttctgcagattgccgttcacgatggggccgacgaaggcaccggtattttttcggaagtcgccgccaatcaggatggtatccgcagtgtcgccatgtttcaaaatatcaaatacgggatagttgtttgtgataatcctgattcgcttatgcagcaggtgtttcgctaaaagttcaatcgtcgtgccgggccctaaaaaaacggtatcgccgtcatttacataggaagctgcgagttccgcgatcttccccttctcctccatttgaacaccgagtttttcattatgcgataattcgtgatcaatggaataagatatgctctgtgcgcctccgtgaatacgtacgatttttccggccttatccagctcgtccagatctcttctcactgtcatatcagaaacttccagttcatcgataatatcactcaccgtaataaaccccgcgagtttacgatatcgatgatttttaaaagtcgctctttttttaacatgttcaatcatcccctcaactttacacacaatctaacatactgcggcaatccggtcaacaaaaataaacattaacaaacaacataatcaacatgtaaaacaacgaaaaacttatataacctctataaacacagatgttatttctttatgaagctattgacaacaaaaatatatgcgtttactattaaacaaaagacaacaattacaaacattaacaaactccaattcacacattggcgaaggaggattcagtaatgctcaaattacctcatgactttattttcggcggggcgactgcggcatatcaagcggaaggcgccacaaaagaaggcggcaaaggccctgtggcctgggatgaatttcttgaaaaacagggaagattcagccctgatccggcaagtgatttttaccgccagtttccggaagatattaaactatgtgaaaaattcggaataaacggcatccgcctttctatagcctggacgagaattttccctgacggcacgggcaaaatcaatcaggaaggtgttgattactatcatcgtattttctcagagtgccataaacgcaacgtcaccccttttgtcacgctgcatcatttcgatacaccgaaaggattatttgatcagggagatttcctcaaccgcgctgcaatagaagcgttcgtcagctatgcggagttttgctttaaagaattcagcgaaatcagatattggagcacgtttaacgaaatttatcccacagccaccaaccagtatttactcggggttttcccgccatctgttaaaagtgatatcacaaaagtcattcaatgcctccatcacatgatggtagcgcatgcgatgaccgtcaacctttttaaagacggcggttatccgggagaaatcggggtcgtccactcattggaaacaaaatatcccgccagcggcacagaagaagaccgccacgcctgttttctggatgacgcgttatcagtgagattcctcctcgatgccacctaccttggctattattctgaggaaaccatgcgtgctctggatgaaatctgtgaggcaaacggcgcttcatacgagttttcagacagtgactttgacgtgatgaaaaaagcctcaacgcgcaatgattatctcggcatcaatcattatcaatgccatttcgtcaaagcgtacgacggagaaaccgttattcaccataacggaacgggcgataagggcacttcggtctataaagtaaaaggaatcggcgaacgaatttacaaagaaggcctgaagcggaccgattgggactggctcatttaccctgaaggcatgtatgacatgctgatgcgcatcaaacgggactatccgcaatataacaaaatttacattaccgaaaacggcatgggctataaagatgagtttgaagacggcatcattatggataaggcaagaatcgactatttaaaagtatatttagaagccgtcagtaaagcgattaccgacggagtcaatgtaaaggggtacttcttatggtccttaatggatttattttcatggaccaacggctacaacaaacgttacggtcttttttacgtcgacttcgacacccaaaaacggtatccgaaagaatcggcctactggtacaaacttgtaagtgaaacaaaaacaatcatttaacgatcatacatgatgaaaagaatctctttccatcatgtgtgccgtctttaggaggtttttttcatgacaaaggaagaattgcagatgctcggttttgaaatcgtcgcctatgccggcgacgccaggagcactttattgaaagtcctgaaagaagtccgtgccggaaacttcgaaaacacggaagcagcattgaaaagcgccgatgaaaatttaaccctcgcccacaatgcgcaaacgaaaatgttagctgaagaagctgacggcaaggacatggaattagggtttattttcgttcacggccaggaccacttgatgacaacccttttgctccgtgatcttattcaggattttatagaactctaccgaagccgccgataaggagtggaaaaatgaacggtatcatcaagcaaatcgaaaagggaaaaccgtttttcgaaaaaatctcaagaaacatttatttaggcgcgatccgcgacggcttcttaactgccatgcctgttattttattcgccagcattttcatcctcaccgccgctgtgccggaagtgttgggtttcacttggcctaaaagtgtttctgaatggctttggaaagtttataactattcaatgggcgccctcggtctgatcgttgcggcaacaagtgcgaaatgcctgagtgaatcaatgaaccgaaaaatgccgaaaaacaaagggatcaaccccgtttcagcgatgcttgcttcagtcgtcgggtttctcattttaagcgtcactcaaatcgacggcgggttctccgcggaatatctcggcacaaaaggtcttttagccgcttttgtatccgctttcataacggtgaacgtttacagattctgcgtgctgaaaaatattacgattaaaatgcctaaagaagtaccgggtaccatttcacaaacatttaaagatgtttttccgttcgctttttccgttttggccatggtgatcgttgatttattgatcaggaatacgctgaatgtatcgtttgcggaggctctctcctctctcttatcgccattttttaccgccgcagacggttatctcgggatttgtgtcatttggggaatgatggcgctgttctggtttgtcggcgttcacgggccttctattgtagagccggccatcgcagctattatttacgcaaatgtggaggcgaaccttcagcttcataatgccggcgagcaggcgtccaacgtgctgaccgtcggactcgggaacttcgtcggcacaatgggaggaaccggcgcaacccttgttgttccgtttatctttctgcttttcgcgaaatccaagcaattgaaagcagtcggaaaagcatccgcggttccggtgtctttcgcagtaaacgaacctcttctctttgctgcgccgatcattttaaatccttattttttcattccgtttgttgtaacgccgatggtgaatgtctgtctgtttaaatttttcgtggatgtcatcggaatgaacagttttatgtatgttcttccgtgggccaccccggcgcccgccggcttgattctcggaaccggcatggggctctcggcttttgttctgacggctgtattaattattgtcgatttcctgatatacctgccattctgtaaagcttatgacaaagtattagcggcggaagaagcccaacataccgaacctgaaaccgcgccgcaaaaatcccgggagatacagcccgtaatggccggcgcctcagaagacgcggccaccgtcatcagcacaaatcttcaggaatcctcatccgccttggaacacggcaccaatgtgttagtgctgtgcgccggagcgggaacgagcgctatgcttgcgaacgcactgaccgaaggagccgaagaatacaacgtgccgatcaccgcctcagcaggcgcctacggatcccattacgacatcatgaaagacttcgatatgatcattttggctccgcaagtcggctcttattatgatgacattaaagaagatgcggaccgcctgcatgtgaaactcgtcgcaacgaaaggagcggaatatatcagcctcaccagaaattcacaaaaagccattcagttcatactggagcatacctcaaaatagaatcggaggtttaccatggatgccaaacttttgaaatcaagattcgaagacattttcaagagaagtaacggagaactgtttttcgcacccggccggatcaacctgatcggggaacatacggattatataggcggtcacgttcttccatgcgcgatcacgatcggaacatatgccgtatgcgcaaaacgcgaagatcaccagatccggttatactcagaaaactttcctgacagcggcattgtctgccttgatctttccgccactgcatacaaaaaagaagacggctgggccaattatccgaaggggatggtccattaccttcttgaagccggcggccaaatagacagcggaatggatattctttttcacggtacgattccaaacggagccggtttaagctcctctgcttccattgaaatgttaaccggttccattttaagaaagttattcagcctggatgtttccgatactgaactggcgcttatcggaaaaagagtcgaaaatgaatttatcggcgtgaattcagggattatggatcaattcgcagtgcaaaaaggcaaaaagaacatggccattctgttaaactgcgataagcttgagcacgaaatgattccggctgcttttaacggatataaaatcgtcattatgaatacgaacaagcgccgggagctggcggcttcaaagtataatgaacgccgcagcgaatgcgacgcggctctcacggaactgcggcaatatcaaaatatcgcatcacttgcggaattgacgggagaagaattcaacgaactcgaacctcttctctcccgtgaaactttgcgtaaaagagcccggcacgcggtcaatgaaaacgagcggaccctctcagcggcggaagctctcaaatcgaatgatttgaaaacgttcggggagctgatgaatgcgtcgcaccgttcgttacgtgatgactacgaagtgaccggtgacgaattagacgcgctggctgaagcagcctggaaagaaggagcactcggagcgcggatgacgggcgcggggttcggcggctgcgccatagccattgtggaaagtgaagaaaccgccggctttatccgggccgtttcatctcactaccgcagcaggacaggtcttgaagcttctttctacatcgcggatataagcgatggcgcggctgaatggagggaaaaataaatcatggcgattctcgttctcggcggagccggctatatcggttctcatgcggttgatcaattagtaaacaaaggatttgaaacgatagctgtggataatctccagacaggccaccggaaagccgttcatgaaaaagccgttttttaccatggagatatccgtgacaaaccgtttcttcgctctgtatttgcgaaggagaacgtaacaggcgttctccattttgccgctcaatcccttgtcggcgaatcaatgaaagaccctctttcatatttcaataataatgtgtacggtacgcaaattacgctggaggtcatgcaggaattcgaagtgaaacacattgtgttttcttcatccgccgctgtttacggcgaacctgaaaaagcgcccatcacagaagacatgccggaaaagccggaaagcgcatacggcgaatcaaaactcatggcagaaaaaatgctgaagtggtgcgataccgcttgcggcataaaatatgtctcgcttcggtattttaacgttgccggcgcgaaaacggacggttccatcggagaagatcatcatccggaaacccaccttatccctatccttttacaaaccgcgctcggtcagcgcgaggaggttttgatattcggcactgactatgatacaaaagacggcacgtgcatccgcgattatgttcatgtttctgatttaatcgatgcccatattctcgctctggaatatttgcaaaacggcggagacagcggcattttcaatttaggatcaagcagcgggttttccgtatcagaaatggcggaagcggcccggcaagtgaccgaaagagacataaaagtaagagcgtccgcaagaagacccggtgatccaagcgccctcatcgcttccagcgataaagcgcggaacattctcggctggaatccgaaacaaacggacatatcggaaatcattgcgtcagcatggaattggcatcggcatcatcctaacggatacaaggacaaatgaaatggaggcggcggtcattgacgtttttgaatcagtggcagggtttctgaaagaaagcactgtcttaggcgacataaatgaaacagatgtgatttatacaagaaacagacttctcgatctgctcggactgacggattatgcagaaccgaaacgtatcaagaaacaaaacaggcttcactatttggacgaaatggtgaaagacgcggtaaaacggtcaatcataaacgatacgccggctgaaagagacatgctgggaagcagaatcatggacgtaatcacaccggccccttctctgatcaatgacgcattcagcgaattgttatcagattgcccgaaaaaagcaacagattatttttatagattgagtcaaaacaacgactatattaagacgcgggccattcgaaaaaatatcgtgtaccgctcaataacaccttttggggaattggacatcaccattaatctatcaaaaccggaaaaagaccctaaagacatcgccgcggtaaaaaacagtccggaaaaccggtatccgaaatgtctgctctgtatggaaaacgaggggtatgccggaacaccgcatcaccccgcccgttcaaaccaccgcatcatcaggcttgacttagcgggagaacagtggggttttcaatactctccttatgcgtattacagcgagcatgccatctttctttcaagcgtgcacaagccgatgaacatcagccgcgaaagcttcagaaggcttctggccattacggaaattttccctcattatttcgcgggatcaaacgcagacttgccgatcgtaggaggttccattctttcacacgatcattatcaaggcggcgcccatgagtttcccatggcaaaagcgggttccctctacccttttcatatgcgtcattttccagacgttcaggccgaagccgtgaagtggccggtatcagtgatccgccttcgcgcaaaagatccggatttgctgacagatgccgctgcgtatgtttttgaaaagtggcgggaatattcagacgaaaccgtcagcatcatcgcgaagacaaatgaaccccataataccgtcaccccgattgccagacgcaggggaacggattttgaaatcgatctcgctctcagaaacaaccgcacctccgaagattatccggatggcatttttcacccgcatcaagacgttcatcacatcaaaaaagaaaatatcggtctgattgaagtgatggggctcgccgttttacctccccgtctgaaagatgagctggcagaagtgaaaaagtatttactgaatgaacatcatgacatcaaggacattcatcttccgtgggctgaaaacatcaaagcggataaagacgtgacaccggaaaatgcagccgctgttttacaaagagaaaccgcgaatgtatttttacgcgcgctgaccgatgcaggcgtttttaaaatgacacccgaaggaattcaggcgtttcagcgtttcacgacgttattggagaatgacagctgaaacattcagagtgaaatcaatcaacaatcttttttatcaggaggtattgtgatgttcaaaaaccgattgaaacgtgtatttgtaaacgcaatctgtctttctctcattttcaccgcttttacatttcttgagaagtctcctaaagcaaaagcggatgccccgtttgcctatggcgctgatataggatggctgaaacaaatggaggatgaaggtgtgcgctggctggatgacggcgggaaacagaaagatgccttgcagattcttaaagatcacggaataaatgccgtgagactgagagtgtttgtgaatccgccaagcagctattattggctgaaagacggcacaacatggacgatgctcggctatagtgacaaagcgggcgtacttgcggcggccaaaagggcaaaagcgttaggaatgaaagtaatggttgacttccattacagtgatgtgttcgctgatcccggccaccagatcaagccgaaccaatggaccggctattcaaacagccagctgcaggcagccgtgtataaccatacgtacgatgtcatgaaagaacttaaaaatcacggcatctctcctgattgggtgcaagtaggaaatgaaatgaattcaggaattttactgcccgacggcagcacgagcgatttcagcaaattgaccggcttactgaacaaaggctatgacgccgtgaaatccgtcagcccggccaccaaggtaatcagccatttagcacacggcacggacaacagcctattcagatggtggtttgatcaattctttaaaaacggagggaaaaccgacatcatcggcgtttcgttctatccctattgggaaggtaagccgtactgggagctcaccggccatttatcatctaatttgaatgacatcgcctcacgctacaacaaggaagtcatggtggttgaactgggcggagatgaaaataatccgaaagattcctactggaccataaaagacaccataaaactggtgaaagccgttccgaacggcaaaggaaccggcgtattttactgggaacccgaagctcactccagcgttctgtcagatgcgtatccattaggcgcaaccgcaaaagtgtctaaaaacgtcttgaaatacacaaccgcaattgacgctttttatgatgccgcaacaggaaaatgattgatgcaattctaaagcaggctcttttcgcagcctgcttttttgtaaggctgcagagttagcctgttatgaagagctaataacgaatacggaaagaaacatactcgaaaaaccacatttcggttaaaaataggatacttcttctgttccccctccttcttatttctgcgcactatctctcagttcctaaataataactttacgattgttgaaaaagaaacaaacattttataatattgtgtaagcaccaccgagcaggaggacgggtcatggacaaaaaagaacagctcctcacggatttcagggacttttttaacaagatggtgtggctgaataggctgaagatggaagaaagccttaaggggcataaaccttctgaagtgcattgcatcgaattcatcgaaaaaattgaagacgccaatgtgacaaaacttgcggagtccctttatatgacaagaggcgctataagtaaattaacgaagaagcttatcaataaaggccttatcgaaagctatcagaagccgcttaataagaaagaaatctatttcaggcttaccgagcaaggaaaagtcatttataaaattcacgaggaattgcacaaagagtttcaagaacgggacaaaatcgtgtttgaacaagtaactgatgaacaatttgacacgatgctgagcttcgtggaaacatacagcaggcatttggattcagaaataaagaaacttggtgcagacatgaaatcggaataaaaccataggcagccctgctccatgaaaacgggctgcctttttatatccctcttattgttgacaaagaaacaaaatcactctattattttgttgacaaggaaacaaatacggcgattttgagaggagaataatatgtcaacacataaaagaaaggaacttcggctgccaaaagaagttctcacagccgcctgggctattgcactgggagcaattgctccaatgcttgactctacgatggtaaacatcgccatcgacaaactgaccaaagacttcaacacgacattggataccattcagtggtccgttacaggctatatgttagcacttgcgattgcagtacccgtatccggctggcttatgaataaatataacggtaagaaaatcttcatcggctcagtcatcgcctttggtgtcatttctgtttttgcgggaatgagccgtgacgtttccagcttcatcttcttccgtttgcttcaaggattcagcgccggcattatcactccgcttatgtcaacactcttggttaaaacggcaggtccggaaaacctgggaaaagtgatggcaatcgtcagcacccctatgatcttcggcccgatcttaggacctgtcatcggaggcttcatcgtccaagtcgcttcatggcattggattttttacatcaacgtgttcatcgttttggttgccgcaccgcttatgatgaaaaccattccagactttgaaccattcaacaaagatcgtaaactcgatattttcgggattatcaatttgtcattaatgagcgcggcattgatgtacggtattacgaaagcggcggatcatgcatcatttaacaatagcgacaccattttatgggcgggcatcggtcttgtttcagcagtcatttatcttgtatataatctgatcaagaaaaaccaaaccgtgctgcctatgaatttgtttgcaaacaagagcttcttagcatcttcgatcgggttgttcttagcgaatgttgccatcatggggccgatgttaatacttccgctgttttttcaagacattcgtcatttcacggcagtcggagcagcactcgctttaatccctcaaggagtcggaatgctcgtgactcgtccgctgatcggaaaaatgattgataagatcggtgcgaaatacgtggttacggtcagtcttgttctttcgctgatcggatctatcccgcttatttttatcaccgataacacaagtatgatttggatttccgtcgtattatttatccgcggcaccagttttggaggaattatgctcccattaatgagtgacgcttatacaggtcttgacagcaaacagcttccggaagcaggtgtcggtattcatatgattgaaaacctcggttccagctttgggtcagctgtgatcgcaaccgttaccgcaactgtcatacaaggattgcagccaacgattccgaacagtttaaaaggctaccatgccggattcttagtatccgtcatcatccttgcggccatcttcattccaagtctgttccttacccataaaaagactgcgatataaagaacttttcaaagtaaaaaacccttgcgcagcaagggttttaatgaatgaaactgatgattgttgccggcagagtcagccaacaacatacaaagccttttactcattcacattgcttttcattaaccattctacttccgttaattcttgtttttgaacgtcttttgtgtgctttttcgtaaaatggactttaacagcttcttcgttttcccaaatctcccaaagcataattttgcgttctgatggttcaagcggatgagcatggaactgaatacagccttcttctttgttcgtttcttcctcaagttttttgaattccttcattatttcattaaggtctttatcactgatgatttttaagcatgccgttatgtaatgcatcgaaactccccctcttcccatcattttatggctttacattataacatcgaaacccgcataccgcattctcaacatataaaaaaccgtccataaaaaatgaacggcaatgtttatttaagatcatgaagagcgacttttgcagcctcagcgataagagcattatgataatcggcatcttctgtaaatcggtttgacaggattgccaaaacaatcggagctctgtcaggcggccaaacgatggcaatgtcgtttcgcgtcccgtaacttccggctccggatttatcgccgacttcccatcctgcaggagcgcctgcccgaatcagttcatcgccggtagcgttgccccgcatccaatccgttaagatcgtgcgcttgtcagtcgtgagagtgttacccaaagtgaacgctttaagatcggttgccagtgcctttgctgtgcttgtgtcacgacgatccccgggaatcgcagagtttagatccgtctcgaatcgatccgctttcgttacatgatccccaatctgtttcagtgatttttcgaaacctttagggccgccaagctgctgcagcaataggttccccgcagtattatcgctgtaacggacagcggcttctgagatttctttcaggctcatgcctgtatccaggtgtttttctgtgattggagaatatgtaactaaatcgtctttgctgtagcggatgatggcattaagtttttcatttgagcttttcttcagaacagcagctgcagccagaactttataggttgatgcgtaagcaaaccgttcattcggccgataggcgattgtcttgtttgaccccgtatcaatcgcataaaccccaagcctggcatcaaattttttctcaagctgaacaaatttttgattcgttatacagcttgtcatttttgtgttttctatggattttgcttcagcgtgcgtagagccgaataaagggctgaaaccggtaaagcttaaacataaaagcccaatgcatattccaacttgtattcccgctttatttttcacatccagacctcctcattataatgtttttgtatacatcttctaattaacattacaaacaggatgaaagtcaatatatttcctgtgaatgattaaatcctgcattctgattcctccccttattaaatgcgccgcccttgccgcgtctgaatgtttgcatgtccgcttcgtgttcattatctatttgttatccctccgtgcaaataaaaacggacaccaatcagagcatagtgagctgtgcaatgatcagtgtccgcaggctttccgtcttggatctatatatgtttctcttgcagactataaaaatcataaggtaagttaacaaacgcattaccttaatctcgcggtcaaaattatatcattttatatatttcaataagattattatctggatctctgaaatgagcaactcgtgcacgccattcctgacgatcatgtggttcattgacgcatgtaatcccttgcttgtgcaaatagtcatacgttttatcaacatcttctaccttaaattgaagcaaaaatctcgattgcgaatctccgtctaaagattttctttcttctccaactatttcagccatattttcttgagataaaagctctattttcgtttctccattatcgaaaagtgcatattccatttccttctctaaccaacttattggaagtcctaatgaatctttataaaactcgacgctttttttaaagtcattaaccaatagtctaatttgcagcagtttcatattgaacgcctcctatcattttactggccattcatttaatcatacaatagggacctgacagcattatgtcaagtttccacaaaaaaatttcccatactgcacccaaatttcggatggaaagccttcgaagattcatgaaactgcgtttgatcaattcacattcttagtttgaattctcctcctctccaccgtggaggctccggccgtgtaagtcgcgcacccgtaaacatccggcccccgctcccataagtaacacaactgataaataattgactgagtcgttttttcaccgtcatcgcttcccctgttttttatattctgcgatttccttaggggtagccttccggactccgtctgtgtctgtcctgtttgccacttgagcgccttccatgttttttatctcgctgacgactcccaaatgctctaaatacacatgatcaccaatcttgaaacgattcagtttggcccgctcctcggtcatgctcctgtattcagtcgcggctttcatttttaattcagccagacacatttgacaaagtgttactgttacagaattgccgttaaaatcagtaaacgaaaccgatctgacagattccttttccgggtgcatcgtacatgttttcttcataggtgaaggccgtgtaaatttaatcattccgcttcctcctcaaaaaagtcttttcgtccctctgacataactcggatgaatgggaagttccgtacccccgcattcgaactgtcacaacacatggagattgcctttccttcgccgtctgacggattttcatccatcctgcatagctgtaagcctatattcctttatattcccaatgcccgccgcacttccctgttatgatgaagtttttaaagctattgaccagttgcccaggttgattccatgcggaaagcagtttgggccgccgtatcctaattcattcgggtaaatttcagccctctaatatgtgtgtgtatgctttttaaaggaagtgcgtcacatgatgttctaacaaccgattcaacctaaagctaactctaccccaattcccgatcataaaataagtaaatttacccagaacaaattaatcattttgcactttcaaaatacttatttggcttttccttcattcttccatggtaatatcttgttgaagtatttcgcatgaaaggatatggtcatgaaagttttcgaagcaaccaccctcctcgccgccgccaaacagcgtgcgggtgaatataaaaaactgcgcggtcagatggtcaacctaaaaaaagcgtttcaaggtatggctgatcttggtgacaatgatttctcaggccggggcgctgacaatatcaaagcctttttccaggatcacgccggcgtcacagacagctggcttgatctgatcgatatgaaaatcgcatttctcacaagccttcccggcaaagtcgaagacgcaggtctttccgaatctcatgtagaagaatcttttctggagcacgagctcacccatgccctcagtaaatcaaaggcgattatggaagcgcagaaaaaagacatgcgctccatcctcggtgagatcgaagacatcatctcgctcgaattgttttcaaccgaaagcacagatcaaaagctttcttcagctgacaaaaaaagaagcgaaaccatacataaactcggcaagcttgatcacgatctaacgaaagaatacgcagaaaccgaagcgaacgaacagtttatccaagccgactttcagcagctccaaaacgccacaggcaaaggaaaaagcgccacgccgcttcactacaacgccaaagcgtaccgtgaaagcgacatccataagaaaaaaggcgatatcgcaagacattcggatgcttatttgacgattaaaaaggaagaagcgaaagagcgtgaaatcaaggatctgaagaaaaagctggctgatggtgtcaccgatccggatgagtatttggaaatcgcaaagaagatcggctatgaaaaccttgaacccgctcaggtggaatatgtaatgcagcttgaacaagcaaaacagcttgaagaagtcggagaaacggcttgggatatcgtcaaaggaataggcgtcggcctttatgatgtgggaaaagacaccataaccggcgtcaaagatctggctgtcggcgcatgggatttttaccatctctccgatgaacaaaaagtcgctaaaaccatatcggctgtattgaacacgccctcctacgcaaaaatcatatggacaaacctggcggattcgtggaatgataaaatggttaacggggatgcgtattcaagatcccattacatcacttacgccatcgggagcatcgtcgggctcaaaggttccggctcagctgtaaaagtatcaagcaagctcgcgaaaacaggcgccgccaaagtggataacgtcttggaagccggtgaaaaagcagctgcaaaacatgtaaaaaccgggattgaaaaaggaaaaaattatatcaattccgtttcgaaaaataagtaccaacccgcgcttgccggaatagcacaggatattgaaaatactcacaatgtgaagaatactcctttgttgaaaagtattattgaagatcagaaagagagtgtgctcagtaaatctgtgacttctgacaataacggcatacatagtgttaaacaaggagacagcagtcctctcgcaccaggcggtggcttagctgctcacgaagcaaaaggcggacaccttctagaaaggcatgttgggaagactgatgaagagttattacagaggctacagataaacaagaagatacgtgcctcttctagtttcactgataggccaactgcagaaagagtcgctaatgaaacattaactaaacataaaaaggaaattgaagagtggttaaaaagtgatgttaacgatccattaccgttaccttatagaggaaccgaagttataggtagaggagttcgtaaaggttcaaatgaagttaaagatatgactaatgctagaatagtattaaagaaaaataaagatggtagctttatactaacaggctacccaacgaggtgatatataatgattgaaattaaagtttctgatcctgtatttagatttctcggcggacattttcaccaagatatagagtctccggaaaatgcacttgatgaatatttaaatgaagcatcacaaaaactaaaagaaagagatttaatagcactaactgagtttgtaaatagtgattattcagaagaagacaagaatgaatttatagaggaagcagcggatggtatatactttcctgaagatgatataactccattagaatggcttaagcaagtcactgaacaaattaaaaagcatcttaaacaacatagttagaaaaagagccctcttttaagaagggcttcttttattaattcaatttcgctttcgtttttggtccgcaaattccgtctggcttcaaaccatacatgagctgaatcgtactgaatcgttcagccgcatttactgatgtaagtgaatttaaataaattgcaaaaaaaccctcctcatcttgagaagggctctgacttatacttctttttctctaaatcagtccgaagcaaaaaactgatgccgctcaacttttcaatcgaagtgcttcagcgggttctccaactatttgcccctatgcttttcttttgctttttgttttctgattaaatattcttgttcctttattttttctctttgttttttcttttcttttttcaagctcctgttttattgcattttgcgccttagttgatatcccgatatttttcatctctttagaagcttgtcattgcaatctttttggatttaatttcttagattttgctttaacacaaccccttcttgttcagtgtgggagagagtctgtaaaaaaggaaagagtctccgcttattttaacaacacttcaagttttgctttggttcaagcgcataaattccatcagcttttaatccattcaccaattgaaatcgaattactgcattcgctgttttcgctccatatgctccatcaatcccgaagttcttccgctttaataaagggccgacagcgccgttcgaatctgttttacgctctcccctcgggttttaatgggcttttgacttaaaaaaccggaaagcaaggggaagtatgatttcttgccttaggatggagggccccctgtatcacttctttatcatcgacggcaaaatgatatctagtcgattcactgctaccggtcatataactgatttcattagcggctgcatgcgtcatttcctgtgctgtgaatgatttccagattttcgctgtatttttcatacaaaactaaatattccgtttttcaaatacaaaaaaacagcaggattaaccagctgctgatcgttatcactttagccgttcagtgatacggaatttctgtatttctctgtaatgaacaggtttcggcaaagaccgccgccttaaaggcgatgttcacctcccttgaagtatacagcgaatgtacttcaaaatcggcccaaaaaagcagttccgtccccaattcgtccccaactcgatgaatgatgacaaaatcaataaataagcaaagtaaaaaacccttgcaacgcaagggttttggctatgattccgactgggctcgaaccagcgacctctaccctgtcaaggtagcgctctcccagctgagctacggaatcatgatatgtatgtgttgctgggtatgttgttgtctctctgacatttataattatatatcctgatttctcattcgtcaacactttttttatctaaaataaaaaagggcgcgtcgcaaaattgacggcacccttttcgtttatgatctcacttgggcgggggttatttttttcaatgcctgttcgaagtcgcgttctaaatcttcggcgttttcgactccgacgctcaggcgcagaaggccgtctgtgatgccgcgtttttccctctctgatttcggcatggcggcatgcgacatggctgcagggtatgagagaatggactcgacagcgccgaggctgacggcaaataccggaagcgatacgttttcgaccagctttttgacggcttctttgctttccaattcaaaggacaggacggcgcccgctccgctcgcttgacgtttatgggtatcggctcccgggtgtccggcaaggccgggatagtaaacgtttttgattgcgggatgcccgtcaaaataggcagccagccgctcagccgtccggctcgctttttccagtctgacctgcaatgtttttaagcctctcaatacgagccagcagtcctgaacaccgagcaccgctccaaacgagttttgcagcttatacagctgattgccgagctcttcatcttttacggcggcaaggcctgacagcacgtcactgtggccgcttaaaaatttcgtcgcgctgtgaagcacgatatctacaccgagatcaagcggacgctgcagagcaggcgtcatgaatgtattgtcaaggtatgtcagacagccgtgttcctttgccagtttgacgacgcccttaatatccgtgatgccgagcgtcgggtttgacggtgtttccatataaatggctttcgtgttcggccggatggcgcaggcgaccgcttctgtgtccgtcatatcgacaaaggtatgttcgattccgaaacgggacagaacctcagtcaccatgcggaatgttccgccgtacacatcctccgtgacgagaacatggtcgccttgggataagagcagaaacgccgtcgaaatcgccgccataccggagctgaaagcaaaacctctcgttccgccttcaagacctgcgatcgtttcttcaagcgctgttcttgtcggtgtgcctgatcggctgtagtcatatgtcccgaattcttcaaatgaagactgatggaatgtggaagcatgctggatcgggacgctgacggctccggtggctccgtctgttttaaatggattgtgcacgagctgggtttccagcgtccaattgtgattactcatatgacacggccccctcttttacttgctgtaatgcctgctttacatcccgcttcaaatcttctgcatgttcaatgcccactgaaaaacgcagcagacggttgcagacgccgtttgcgatacggatatcttccggaatgtccatgtgcgtctgtgtcgcggggtatgtaataaaactttccaccccgccgagactttctgcgaaacagatcgttttcagcgcctttaaaaacggattgacccattcttctttttgcagccggaaagacagcattccgccttttccgggatataacacgtcggcgatttcctcttcctgttctaaaaattctgcaagttcaagggcgttttcttcatgacggcgcattctgagtccgagtgttttcatccctctcattaaaagccacgaatcaaacggcgggagaacggcgccgatcgcattttggtgattaaacatgatgtcgccgagctcttcatccttaacgacagccagaccggcaaggaggtcattgtgccccgctaaatattttgtggcgctgtgaatgacgatgtccgctcccagttcaagcggacgctggatgaccggggtataaaacgtattatccacaatcaaaagcaggccggcttctttcgtaatccgggcgattttttcaatgtccgcctcctgcattaacgggtttgtcggtgtttcaacaaatagcgctttcgtgttttccgttattttggagcgtaaacagtcttcatcgctgaaatcatcgtaaataaagcttaagccgtattttctccattcgttttcaaacaaacggtacgtgcctccatataaatcggaggatacaatcaattcatccccgcttttaaataaagccataatggtttgaatggctgccattcccgagctgaaagcaaatcctctcgcaccgttttccaacacggcgatggcgtcttcgacgagctggcgtgtcgggtttttcgtgcgcacgtaatcaaaacctgtagattctcctattcctctatggcggtaagcggtggacagataaatcggcggactgaccgttcccgttgcttcttcgcttctatttccgatttgggctaattttgtttcaacatgctgcgtcatcagtaagcaccatcctttttcaaaaataaaaaagccccctcttcataagaagaaggagcttttctcttcctcttatcttccaagcgtgaatcgcttgctggatttagcaccttggcactttgccttcccgcggcaaagcaaaccggttgctgaggtttcaaagggccagtccctccacctctcgtgataagaatattgttttgtattttctgattgttctatattaacgcactataaaatagatttcaacaactttttatttatctgaactctcgcaagaagtgcatctgaagaaagaaatttctaataattcatggtacaataggaaaaaaccatcaagacaagaagcggcctggaggaatgcgaagtggcatcaaaaaacggaatcattcatgagaaaacacttttctcccatgagcttgaagaggaaatgaccgttttggtctacctgcccgccaccttctcccccctgtataaatatcatacggtcatcgctcaggacggccatgattatttcagattagggagaatcgggcgtcaggcggaagagcttatgtcaaaaggggaaattgaccgctgcatcattatcggcgtcccttataaaaatgtgcgggagcgaagaaacacataccatccagaaggctctaagttcgcctcatataagcggtttatcgccaatgagctcgttccttttatcgacaaagaatacccgacttatcaagtcggatacggccgcaccatgatcggggattccctcggcggaaccgtttcgctcatgacggcgattgactatccgaatatgtttggaaacgtcatcatgcagtctccgtatgttgacgggcacgtgctggatgccgtccggcagtcggaggatctcaaacagatttccgtttatcatcaaatcggagaaaaagaaaccggcgttcacacgacggacggccaggttcttgatttcaccgcgccgaacgaagagctcaaacagctgctggaaagcaaacagtctgaatacacgtatgaaaccttcgacggggatcataaatggacctactggcagccgctcatcacgccggcgctgaaaaaaatgctgtaaccattcatttaaggagggaactttcatgaaatacggtattgttttatttccatcaaaaaaattacaggatctcgcaaattcgtaccggaaacgctacgacccgagctacgcgctcattccgccgcatctgacggtaagagatccgtttgaagcgacagaacaggaaatcgagcaggtcgtatcacagctgagacagacggcgaaagagtcgcatccgctcgttctgaaaatcacaaaatacagctcgttttctcctgtgaataatgtgatatatatgaaagcagagccgacggaggaattaaaatctctgagtgagaaatgctactcaggagcattatccggcgagccggaatacagcttcgttccgcatgtcacggtcggccagaagctgtcgtcagatgaacattccgacgtactcggacagctgaaaatgcaagacatttcccacgaagaagtcatcgaccgttttcacctgctctatcagctggataacggctcatggactgtgtacgaaacatttttattaggcggaggagaataactgcttggaatccatcatcgtaaaaactgaaaaacagctgaacgacgcttttttcgtcagaaaagaggtctttgttaaagaacagcacgttccggaagaagaagagattgatcaattcgaagacacgtcagagcatatagtcatatatgacggcggccagccggtcggagccggcagatggcgcttgaaagacgggcatggaaaattagagcgcatctgcgtaatgaaaagccatcgttctttaggcgtcggagccatcataatgcaggcgcttgaaaaagcggcggcagccaagggcgccggcagctttatcttacatgcgcagacgcaggcggtcccgttttacgaaaaacaaggataccgcgtcacatccggcgaagaatttctcgatgcgggcatcccccatctggaaatgataaaggaatacaaacaataaaaacaaaagcactcctgttgatatggcaggagtgctttttttatgaaaacaataccgtttcatgaattttattgcattttatggaaggttaatgtatgtttagtatacgaagtattacaattcatacaaaaaatacaattcatatttcggagggataaacatgacggcaccaaaaggaaaacacatattcgggactgttaaagtgggcacaaaaggacagattgtcattcctaaagaagcaagagatgttttcgatataaatccgggggattcactgcttatgcttggggatgaccagcaaggtatcgcacttgttaaacaagaactctttttcgagtttgcaaaagatattttaaacgctaagcaaatcgacgcagatagcgaggatgagtaaatgcacgcgattgagctgaagcaattaacgaaacattataaagaaaccgccgccgttgaccgtcttgagttctcagttgagaaaggggaatttttcgctttactcggtgagaacggagccggaaaaacgacattaatcaatatgctttgcggactcctttctccggatgaaggtgatgcatcagtgcttggacacagtatttcgactgatttggataaaataaaaccgaaattgaatatgtccccgcaggaaacagccatcgctcctcatctaaccgtacgggaaaacttagagtttatagccggagtctacggaattccgaaaaaagaagcaaaaaaaagaacagatgagatgctcgaattgtttcaattaaaagagaaagaaagagcaaaaaccaaaaccttatcaggaggaatgcagcgccgcctcagcatcgcaatgggcatgattacgaaaccggatatttatttcttagatgagccgacattagggctggacgtccgttcacgccgcgagttgtggaaaaatcttgagacattaaagggagacatgacgattattttaacgacacactatttagaagaggctgaagcactggcagaccgtatttgcattttagaaaatgggacattaaaagcactgggcacggcggaggatctgaaaaaacaaactcattcagccacatttgaagatgcctttttagcgatttgtgacggagaggcgggtctttatgcttgatttcgccattcgcaaccgcaaagagatttttcgtgatcccttatctatcatccttggaatcgcactgcctgttattctattgtttctgtttacggcgattgaaaaaaatgcgccgcttgatacctttaaaattcagcatttagcacccggactcattgttttcggtttcgctttccttacgatgttctctgcattgctgatcgcaaaagacaaacagaccgcccttttgacccgtttgtttgcttcccctttaaaaacagccgattatgtcatcggttacgcactgccgatgcttccgttagccattttacaaatcgtcatttgttttatcgcagctgctgctgccggtttatccgccgagtggatgaatcttctcgcaggtatcgctgtcttgctgccgattgcgatgatgtccgttttcttcggtttatgtttaggggctgtgtttacggacaaacaaatttcaggtatcggaacgatttatattacactcgtgcaatttctgggcggggcttggatggaggtgagcctgctcggtgacacattcaaacatatcgcttatgccttaccgtttatccactcgatcgagctggctcaggaagtcatatccggagattattcttcctttcatcagcatatttggccgatagcgggatataccgttttggcgcttgcacttgctttcctcagttttataaaaatcaggaagagttaaaaaagccggcactccgtaatgggagcgccggtcttcttttttacgtttctttcagaaggcttatcgtatgcggcagcagacggtcatcccccggactgccatggcccggaacgacaatgctgatgtcctgatatcttttcatgactttgcggacggcgcgcggccactgatccggataaaagcccggagttggtatgatttcctttgtttctaaagccttgattaagcaaccgccgaataagagcttatcctcaggcagccagacggtaatattgtcttccgtatgcccttttcccggataaaacgtttcaattttcatatcgccaaactgcagctttgtcacgtttttcaaatctccgagcggccggtcatatccctgctgccgggcgaagtcggcggtcagcttcgtgctgtgcacctttacaccgtatttgtacagtgtgttcagcccgccgatgcgatcgtcatgggcgtgtgtcacaatggcatcggtcatccttttgccgggaaaccgctgttttatttgtgtcattaattgctctgtgagactgtcattccacggagtatcaatcagtacgattcctttggaagtttcaagaagcaatccgttcgcagggacgggacttccgtctgccgtaccgatgcttgtatgcatccagacatgcggcgccagctgtgtgagagtgacatcttttgctgcggagctctccgccgcgtgtgccggtttcattccggcagtaaagaggccgaatagaaataaccccgcaattaataatgaaagctttctcaaattgaatcattcctttccgcatctttcatatatacggctcaaaaaaacccggagatttccgggctttttcacacatattgatttatcaaccggccttttcccataatttgcggcagacgggaaagagagcgcttacgtttttcctcatgcattttcttttctgcggctgcggtgttttcctggcggcgctccacctctctgtacaccctgtcattggcgagggcggccgctttcgtaatgccggcgtaatcaggcttataacccgctgcccggtttgcgtattgagaatactgctggttttgaatccgtcctgcataaatcatatgtacccctccccttcgcttttcatttcccttaatcttactttttgaaacgcggttcttttgttatgatattctttgtctatcaaatggatgaacaccttttaatgggaggacccctttttgaaatgcgcccgactgaataaccgaacgatacatttacatacatattctagagaacattaccaattcctttttgaagaagctcagaaaggaaatattttttgcgcacattgtgaccagcctgtcttgatgcggctttcgattttagagcagccggcattttatcaccggcaaaagggagacttcaccgcctgtgaaaaagcatgcgccgccgaggaaccacaagcggagaaagaaaaagaagagtataaggaggcaggcatgttccgcctgccgaaaggaaaagcgatttcagagaatccgaaaccgatcgtctcagaatggaaaagcccgaaaaaagtgcctgcggccgaaccgttttcaccaacatccgaggcagctgatacatctttgttccccggcatcggcctgaaccgcgaacagatgcgggcagtcacggaaacggacggccccctgctggtgcttgccggagcgggaagcggaaaaacaagggtgctgacagcccgcgccgcccatatgattgaacacctcggcatttcacctgagaatatgctgcttgtgacctttacgacaaaagccgtcgccgaaatgaaagagcggatggcgaatgagtacgggctggcagccggaaaagtctcccgtctcgtgaccggaacattccacagttttttctataaaatactctatcattatgattcttcaaaatggaacggcagccagcttttaaaaatggagtggcaaaaagagcaatatgtgaaaaaggcgctctatgaagaaaatttggatgaaaaagagtttcccgtcgaccaggcgctgcagcttatcggctgctggaaaaacacgtatctcccccatgagaccattccgcttgcggacgactgggagaaaaaagtgtaccggctctacgaacattacgaacggcagaagcgggaaaaacggcaatttgattttgatgacatggcccaaggctgttatgaactgtttcaaagccggcctgatattctcgcgcagtaccaaaacagattttctcatattttgattgatgagtttcaagatattaatcctgtccagtacaacattatgcaaatgatcgcaagcccggagaataacctgtgctgcgtgggtgatgacgaccaatccatttatgcgttccgcggcagcagcccgtctttcattcttgattttcaaaaggattatccggcagcaaagaccatttacttaacggcaaattaccgctcgccgcatccgatcgtctcaagcgctcatgccgtcgtaaagaaaaataaaaaacggtatgaaaaaacactttctgccgtcaaagacggcgttcacaatcccgtgatgttttatccttacgatgaagaagaagaagcgaccatgatcgtttcggatatgaaagagaaaattcaaaacggggcgagtcctgatgattttgccgtgctttaccggacaaacagcgccggacgggccatttatgaaagactgcaccaatcatcgattccttatcatgccgaccgtggcgtgcagacgttctacagccgcagaatcgtacgccagatcctcgcctacttatatgcgagtcagaatgaagatgatacggatgcggtgaaagatctgctgcccgccttatttttaaagcaatccgccctgcaaacgttaaaggcgctgtcaatcacggaagattgcacgatgattaaggcactgacgaaactgcctgacctgaagccttttcaaataggaaagatcaagcagatcgttccgtttttcgcaagcatccggacaatgaagcccgttgaagccatcacctttgcagaaagcaaaatgggtttttccgagtatttaaaaaaacggggcaatgagggaaacaaactggaaaaaggctctgatgatctcagggatgtcaaagtggccgccaaaaaattcaaaaccattcccgattttcttgcgcatgtcgatcatatgcgcgccgctgagaatcagaaaaccgatgaaaacggcgtcgaactgctgaccattcaccgctctaaaggtcttgaattcaatacagtctatattttaggcgcggctgacggctcgataccccatgacttcgcgcttgagacagcgagacagggcgatcccgctccgctcgaagaagaaagacggctcctgtatgtcgccatgacaagggccatgcagcatttatatgtatcttgtcccgcgtacaggcggggaaaaacagcgcgcagctcaagatttctcgagccccttcttcggacggacagacggagcgcactcaggatataaagaacccggcagatcactgccgggttcttctcacataaaaaggcctttttagcaaggccggctgacgcctatttattgtttaacattttagaaatggtgccaaaatcaagtttctctttaccgcttgtaatcgattgaacgattttgtcttccaattctttcggaacacgcttgttagccagctgggacaccttctgaatgacgcctctcaccgtgttttcatctttgaaattggcattttgcaatgatcctgcaaggttcatgacatccttcatgctgacgcctgttttcttctcaatatttttaaaaaattgattatccatggtgtgcctccttttgtggagtaatacgatattgtatgaataaagggcggaacgtgtgcccgtaagacaaggaaaaaattccgcatctccttctctatccttcatacattagggaagcacgggactgaacggtcccgcgcttatccaaagtcttgctaaggtttagccaaaaaaggatgcaccgacaatgatcagaaggatgaacaatacgacaacaagaacaaatgttgagccgtatccgcctccgacatagccgcctccgtatccgcagccgccgccgcagccgtaaccgccgtagccgccgccgaatccgccatatccgaatcccatatttaagcacctcctttactctctatactctatgtgagccgacttgtttggcttggataaatgcatagggccggtgcggatttcttttcattttattgagaatgctcatttttcttcagtttcgcttctgtttcggcggcaaacacatctatccattcctcaaagcgcgctcccgcttcatcaaactcagacagctgtttttcaatagataagatatagttgtcatgctcccgctgattttgattgtgccggcggtatttaccgtttatgaatgattcaaatatattcataacatcccctcctcctatgatctatgccgggcagaggccggcgttcggcaaaaaacaaaaaaaccggaagctccggttttttttgaaaacggctatttcggttttttcttttggccgcagccgcagccttttttcttaatttttttttcgtaaggctgatgcacagttgatttgtatggagagtgttgggaaggtttgcttgattgattcatggtgatccttcctttccttatgtcatatatgccagtttatgccgaaagtgacggtaagttgctggtggaaccgccttattcctgcagaagacgagaaaccgcagcttcaatgatcccggccgcgccggctatggctaacagcaaaatcagccattgcgcagcctcggggatcacaatctgcgccgcaattaaaaaggcggcgcaccatacgcccgtacaccaatagcagctgagaagttcaccgataaatgccctgatgccttttccttttatgacaatgtaggtttctgtcgtgccgtcgggtgcggtttctgttttttcctcgtgaaaaaggctccgaagcggcgccataatggtgtcaaatacgaaaagcctggccagccggaaaacggcaaacgataacagaataaatgaaagccaattgataaccacctgttcactccttttcaaaacttgacctctttatacatatgcgaaaaccctgatcttcatgaatcgcaccttgtccggtaaaaaaataggtgcggtttagttgtttttcttattccgctcggcgtttcatttgcattatatagagtatgaatgagaaaggagtgaaggttatgtcgtttgaagaaaaagtcgaaacactgcaaccgcaaatatacgaacaattatccaacgaattcgagcagacgatcgaagtgattgattgcgaaaatgtcacaatagatacaacacatataacggccgctctttctatacaagcctcagttactacggcgattatcctcgcgacacagctcgcgatcgcagatgaagacacagccgaccaaatcgcaaccgaactgctgatcctggatgattgccaaataaaaaagaggaccgtcattcaagtcctgaacagccgcaatattaaaatcacactgacagcagacgatatcatggcctttgtacaaattttgtttcaattattaaatatactttttgctgaactagacatcctttaacctttcttttcaaatatttaaatagaggtgagaacaaatggcagataacgaaaaattaaaaaaagaactcgaaaatctaccagaagtggatccgcttttaaaggtgcttgtcagcaatgtcttcaaaaaacacggcgtgacaaaggataaaatgcgggaaatccctgatgaagaaaaagaaatgctgatcgcattagtcaaagacatgcaggcgaaaacagaagcttttcttgaaagccagaaacagaaaaaagagcaggaaaaagcgcaagaacagcagacaaatccgcaaacccgcagagaacaattaatcgaacagctccggcaaagacgccaaaatcccggtcaataactaaaaaatagtgatttttatcaggatagatgcctgagtcaaaataaggggccggctcatttaataatagtaaaagaaaaggaggaatagatatggaaagcagaccatactcttgggttgcacttgatcctgaatgcgaacatccgcgagaagaaaaagaagaaaaagaaggaagaagatgcagtgtttgctgtaacggacatggatttggcgaagataatgccttccttgaccaagacctggctcaggcgaatatcaacaaacaagtttctgaagaagcgattattatcagagactcttgtgatattaacgtaacgtcaacagacgttcaagcagtcgcttcagtcatgacagcgattaatgcagcagtcgtaacggccactctcacttcaattgctgacggagtcatcgctgaattggtcgcacaagacttattgcagctaacagctaacaaacaaatcaaccgtcaaaaattgctcatcgaaaactcccgcggcgtaaacgtgacaacagtagatgccgatatcgcagtgttgatctcaacagcgacaaatttactgattgccgtcttagtcatcacccttgtcctctaaaaagaaaaagcagagctaaaaatgctctgctttttcttattttctccgcatatgatgaatatatagacgttcacccacaccaagtgaggctcgcgtacatatgttgttaaagacaaaagtcaaataccctaaaagaaggagctgaaatccatgagctgcggaaaacaccatggccgagatgaaagttgtgtatgcgatgcagtcgagaagattttagcagaacaagaggctgttgaagaacaatgcccgactggatgctataccaatctgttaagcccgacggttaccggtaaagataccatcccgtttctcttgtttgataaaaaaggcggtttgttctccacattcgggaacgtcggaggatttgcggatgacagccagtgcttcgagtctattttcttccgggcagaaagagtttgtgattgctgcgcaacgctttcagtattgcgccccgtagatgtgcacggcgacaccctcagcgtctgccatccttgtgacccggatttcttcggtttagaaaaaacagatttttgcattgaagttgatctgagctgcttcagcgccattcaatgcctttcaccggagcttgttgaccggcctgagccgcacaaagagaaaaagcatcacggatagtcattgattcgcatctttcctaaagaagaatccccttccaaccttctattacagatgcaatcatcagcccgcccggacttccgggcggctgactctccgatatcgtttaatccggtatataaaacgtgaagtcaggagggatattatgagcaagcatacaacatactgtgtgcgtgaagcggtagaaaatattgaagacctgcaaaatgcggtcgaggaagattgcccggccggatgctattccaaccttttatcgccgggtttttcattaggcgatacagtgccgtttgtacttttcacttctaaatcatcaccgtttaccgcattcggaaatgtcggcgagctggataacggtccgtgttttaacaccgtttttttcagagttgaaagggtctgtgacggctgtgccacattaagcctgcttattgcttttgacgagcataagcacattcttgattttacagataaagactctctctgcgatgtattccgtttagaaaaaacgaactattgcgttgaagtcgatctccatagcttctgcgccatcaattgcctgaacccgagactgatcaaccgcacacattcttaaatcaaaaagcataaaaataagctgccggattaaagaattcaggcagctttttgtatggttaaaatccaagcggatgcagcgaggtaatatcgtctattgcgagttctgccggcgctccgttgcttgtcgtccgcaggaagatcgcattattttttcttccgacgattacgcctctgtaggttttcccgttggcttctatcagacaaagggtccgcggcatattatgcggcagcttcgttaagaaatcaattttttcaagaatggacattctgctcatcggctttttcacgcgctttggcgggaccttttcctctggggcggcattgtgaaccgcttcaggctctttttcagcggcttcaggctcttttttagcggcttcaggcttggcagtgtcctgctccgcttgcgccggaacttcttgaacggcttcttctgagcggctgtgctgttcaggtacttgcttttctggttcgacagccactgctccttcaggctgagttttacattcttcctcccgctttccatgcatcggctcttcttccggcggctgcggcgctttcctttttttgattaatatgtcctgcattgatgattgcgtgtctgaataatccgcctgaacaatatacatgagcggttttttttccgcgtttctgttttgttttgacatcttcatccctccgattctgtcatgttttatttatatgacggaatgattaaaatcagaagaaagaaaaaagcaatccctgaaagggactgcttgttatttaacgtgcggtaatatggaatcctgaatccacgtgaagattttcgcccgtgatgcctcttgacaggtcactgaacaagaatgcagccgtgtcgcccacttcttcaggtgttgtcgtgcggcgcagcggcgcgcgctcttcaatttctttcaggatagagttgaaatcactgattccttttgcagacagcgtacggatcggccctgctgaaatgctgttgacgcggatgttttcttttcctaagtcagcggctaaatatctcacgctcgcatcaagagacgcttttgccacacccattacgttatagtttgaaacgacgcgctctccgccgaggtaagtgagtgtaacgatgcttccgccttcagtcataatcggacgcgccgcttttgcgaccgctgtcagagagtaagaactgatgttatgcgcaagcaggaatccttcgcggttcgtatttaaatattcgccgacaagctcttctttgtttgcgaacgcgatgcagtgcgcgatgccgtgaatcacgccgacctgctctttaatgcttgcaaagcaagtttcgatctcagcgtcatttgtcacatcacacggaaggatgatggaatcatttctttctaatgtagccgcaaggtcatgaactgatttttccaagcgctctcccgcgtaagtgaaaatgaggcgcgctccggcttcatgcagcgaacgggcgattccccatgcgatactgcgtttattggcaacgcccatcacaacgatgttgcggccttcaagtgagaaattcatatgtataaagcctcctgtaatcgtcttaaagacatagttttagtacctgatcttaatttttatcatatcataaccttgtccagattgaaagcatgggaaaaagaccgcggatgttgaagcggtctcttttttatctcgtctgcagactgttccttttaaaggcaaaatgattggtcgggccgtgtcccgctccgatgccgagtgtatgttccacggcttcccgcacaaaattgacagctgtctcaaacgcggtctgaatgtttttcccctttgccgtttctgccgtcagcgcggctgcgaacgtgcagcctgttccgtgggtgtgtttcgtgtcaatataagcgtggctgatttgggtaaaagacgaaccgtcaaataataaatcaacgattctcccctgttcaggctgatgtccgccttttatgatgacatgctttgccccaagcttgcaaaggcgttcggccgcttttttccggtcctcaaacgtgcggatttccatccccgtcaatacctcagcttccggaacattcggcgtcaccgcatagctgcgcggaattaacagctcttttaacgcggcctgagattcctcacgcagcagggaagcgcctcctttggcaatcatgacgggatcggtgatgagatgatcaagcccgtactgatccgttttttccgcaatttccgcaatcatttccgcgctccacagcattcctgtttttacagcatcaggccgcaaatcttccgccaccgcgtcaatctggctgcccagcgcctcccgggtgagcggataaatgccgtgaacgcccaacgtgttctgggcggttaccgctgtaagggctgacatcccgaaaacgccgagctcctgaaaggttttgagatccgcctgtataccggcgccgcctcctgaatctgatccggcaatcgtcaatgctttgcatatgctcatgatgtttttcgctcctttcacattatccgatccatttatgataaaaagatttcgctctgctgatatcacttgtgccgtgtattaatgctctgccgtcacgaaacagtaccatcttgaaattgtctgtgcaaaatgaaattaaatacgggttggctgaaacatcaagccctgcccgtctgagctgtcccgcaagattttgcagatcaaactgttcggaaatccccgttctgatctgcaccgtgttccgcccgcacagaaccgccgcttttgtctgattttcataggataaaaacggaaaatcgtttgtgccgcagcttgggcaatcagccgacttaagacgggcgacgtttatttctgaccgttcatttttccataaatcaaaggaacggagaacatgctcgatagatccgcccgttaacagcttcagcgcatctgctgcctgaaaaacggccgtctgcaatacagccgggctgatgattcccgccgtatcgcatgtcataccgcctaaaggcaatgtctcaagcagacagtgaaggcacggcgtgacaccgggaatgacggtaaaagagagcccgtagctgccgacacaggcgccgtacagaaagggaattcctttctgcacagccgcatcattcacaatcagcctcgtttcaaagttgtcggcggcatccacgatgagggaggcatcacgaatcaatccgggtgcgttttccgcagtgacatccatgacaaatccctcgacctctacatcgctatttatagaccgaagccgtttttcagccgccgcggctttcggcatttcctgtctgacatcgtcttcggtataaagctgctggcgctggagattactccactccacataatctctgtcagcgatcgttaccttcccgacccctgctctgacaagcatctccgcacttgccgtcccaagcgcacccgcgccgataatcacggcatgagacgaccggagcttctcttggccggtgggaccgatcggctgaaacagctcctgtctggaatatctgtccgtcataccggaagaccgtctcgcggactgcttgcagttccgtaatctttcaccggaattctcccggcttcataagaaagacggcccgcttctacggcaagcttcatcgccctggccattttgaccggatcatctgcgcctgacacagcggtatttaacagcacgccgtcagccccgagctccatcgcgtaggcggcgtcttttgaagatccgacgccggcatcgacaatgaccggcaccttcgcctgttcaatgataaaagaaagattcagcggatttaaaattccctgaccggaaccgatcggcgaagcgcccggcataatggcatgcaccccgagctcctcaagacgtcttgcgagcacgacatcatccgacgtatacggaagcacgataaatccctcttcgagcagctgttctgatgctttcagcgtttcaaccggatcaggcaaaagtgaccggctgcatccgatgacttctacttttatcatgtcacaaagccctgaagctttggcaagccttgcgattcggaccgcctcttcagccgttgcggcgccggccgtattcggcagaagcgtgtatttagacaaatcaagctgttcgagaaagttaggctgagactcttcaaagatgttcatccgccgcaccgcaaaggttaaaatatctgattccgagacggccaccgcctctttctgaatctcaaaactcggatattttcccgttcctaacagcaatcttgaccgaaactgttttccgcctattgttaacatcctcatccgcctcctacaaaatggacaatttctatgacatcgcggtcacacaaacttgtattttcataattctttttttcaatgatttctttatttctctccacaactacgattctttggtcaagctggtacgattcaagcaaatcctgaaccgtcccctcttttcgattccaatcaatttgttttccgttcagctgaaggatcatatatgaacagcctccttgcgatcgattcgaaacgcttcttcccattcctgtttaatctgtctttccatgatcatatcccgcaccatttcagccgttgccggcgccaacaggatgccgttccgaaaatggccggcggcgaagatgatgccgctgtcttcagggtgttgcccgataaacggcttgccgtctcttgttcccggcctgagccccgcccaaaaccggtctattttcatatgttcgatggcgggaagcatggttttcgcttttgcaatgacggcctcaattcctccgatgtcaggcgtatcgctccagtcgccctgtttcatcgtggcgccgatgacaagccggccgctttttctcgggacgacataacaatgatcatggtaaagggttttggtcagcggggtatcgtcattccacacggaaaggcattctcctttcacaggaaaaaaaggctgtcccaagccgagccggctgaaaaaccggccgctccatacaccgcttgcaactgcgactttgtcagcataaacatccccgccggacgttgtgatgcaatattctccgttcacccgttttacggaagtgacttgtgtgtgctcatatatgtcagcgccatagcgccgcgctccttttgcatacgctttgcaaacatagtacggttcgacatggacatcgtcttttataagacttgcgccgagaatgtcttttgaagcgtaaggctctttttcaagggcatcttccgctgaaagccaagtgacggaaggcagatcatccatcttccgtaaacgggcgatatcttcttcggtatacgccagtttaagcattccgccgttatggcgcctgatgtcaatgccgctagcttcctcaagctcttgccccgccgcttcatacagcctttgactgtgcatggcaaaattaaaaaacgcatcccggttttcacattccgcatgagcacccagcattcccgcggcagcgcttgtcgtttttcggccgacttctccggcttcaaacaagacaacgttctgctgcgtcttcgccagctcataagaaatggcacacccgataattccgccgccgatcaccgccgtatcatagtgctgcttcataatcggcctcccttaccgcacgtgcataccgttttgccgcctcctcgggattttcagctgagaaaatgcctgacatgacggcaattccgtccggcttcgcctgctttgtgtgtccgatcgtctgcagtgtcattccgccgattgcgataacggggatggaaagcgtgcgtttgatctctgaaagcaggctgatgcctcttgcttcaagtccttgtttacattcggtttcaaatatatggccgaacaccacataatccgcatcttccttttcagcttggatggcttcttccagcgaatgaaccgaacgtccgatatgaagatggggaaatctgcttcgcacctgctttacggaaaagctgcgggacggaagctgaacacggtgtatgttggcaaaaagcgcgatatccgccctgtcattgatgatcaatttgtccttatccgcaccgccctttttcaaaagggacaaaagctgcatgatctctcccgctgttttatcccgctcacggatatggataaagcttacttcgcgctgaatcgatagaatatcctcggccagctcggcaacgggtttgcgattatcagttaccgcgtgcagctccaaaggattccacctcttttccgtccttctcggaccagccttctttttgataagccattccccaaaattgatattcataatagcttgaaatcacaaaattctctttcattttcgcgcggatttcctctgtgctgttttcagcaatctcgtcaaaacggctgatctgttcttcgacctgctgtctgaaccagtctccgccgtatgtaccgatccatttttcataaatcggatgctccggtttgcactcttttaggtgttcgccgacttcataataaagccaataacaaggcagaagcgcagctaatatttctccaaaattgccgctcatcaccgacctgtacatatgagacgtataagaataggcggtcggtgccggtttaaatgctgcacgctcttcttccgtaattcctaaaagctccgtaaactcgcggtgcagcgccatttccgcttcatatgtcccttgagcgtggcccgccatcctgcccgtcgtaaacaagtcttcggcatatgcggcgccgaacgcctgaacttttgcaaaatgcgtcaaatagtaggaatcttgcagcacgtaatagctgaaacggtctatcggcaggcttccgtcaccgattcccgttacaaacggatgaacaaaacttccgtcccaccattcggcagccgcctgtctgcattcttcagaaaatgtcatcatgtcttcccccctgataaaataaaaaaaccactttcccgcatcggaaaagtggtttggaatttaaatggataaaaggaaccccaaaaaaataccgctccacttccctacgcaggtctgaacctgttcaagttatgagggtctaaaagtctcacttttatctcagcccttatgaaggacacccctagtggtcatacgattaatgatttatttgttatgccttctatattatcacgaattgcaatttggtcaagcttcaaggatttttctcagttctgacacgtagttgcgcgagcctgtgacgatgagacggtctcctgttttcagccgtgtgtctccgtgcggaacgatgctgtccacacctctgaaaatccggacgaaaatcacatcgcccatcagcggaaattcccgcagaatgatgccgttatacgccgggttttccagattgatctgatataacgaagactcctcattcgtcaggaggctcatcacgcccggcgcctcaattaacgcgcgcagcagcgtttttgtagacagaaggatagaaaaaatactgatgccctcttctttcagttttgtttcatgctcaaccgagccgacgcttgcgatgatacgctcagtccctttctctttcgctagtaaggcgatttcagcgttcacatcttcatttcccgtcgccacgacaagaatatccgttttgaaaataccgtgcgactcaagcgtgccgggctcgtaatcagaaatcgtgtcaaccgaaaaaacggattccgcaagcgtttccccggcattttcctgatacacatggacgacccgtacttcatattcctcctcaggcaattccagcgtaaccgggagcgtcatttggttggcgccgataaatgtaatgcgctttttttcctgcggcgcgctttgccgtttgaataatttcttaaagccgatcggcgtgatgatgctggcaataaccgcaactaaagtcagcgcgccggacatattggcgctgataatgtggagcctttctccgatcgtagccgccgcgataacaagcgacagcgtggacgtcagcaaaaagcccgaagcaaacacggttcttttgtcgtaccatttctttaaataaaacaccgggaacattttgctgataaacagcgcaagcagaagcagcggaatcatcgttaatgttttcggatcttggaaaagcgtccaaatatccaatttcaccccgaccatgacgaaaaagatcggaattaaaaacccgtagccgaaggaatccagctgttccaccatttctttattcggagacagaagcgataccagaacgcctgccaaaaacgcgccgagaatattttccgccccgagagattccgataaagcgacaagcacgataatcagtgtgaaaatggctctcgtgccgatctgcacagtgcctttagacatcgactgcacaaatgaacggtgtttaaagatcctgccgaagaaatacagcacgacccccgcggcaaagagaatcaacagaagccacatatttccgctgtcttctccgtaaagagaagagaagaaagcgagcagaatcattgtagccaagtctgcgataacggcgacaagcaggatgatctggccgatattggagttcatgatccgttcttcctttaaagtcgggaccaccacaccgagtgatattgttgaaataataagcgtcattaaaaatgcgttttgaataaaaccggctaatacaaaggcataggacagcagcaatgataaaataaagatgccgaaaaagataatcagcgcggcagaaaacgtgttgggcgcttccttgccgttcggaaggaattgttttttcttccctttctcaaatgaagaaaaatcaatttccaagccgcttaaaaacattaaaaagataaagccgagaacagacagcgtctccagccacgtgtctccctgaacgacaagattcaggccgctttttccgataataagccccatgatgatctccgcgacgacgacggggatgctgagcttaaaccgatgtaaaaggagcggcgtcaaaaaagcgacgatcagaacgacgactaaagatgcgactgatgtgtgttccatttgtaaatacctccttaaaacaagggttataaaagcccgctttaagcggacgaaaccttactttttttaaaaacataacgcatattctaacaaggcttaacgcgaaaaaaaagtgataaggctttatttcttcaattctttttttaatttgtaccaaaacagcgtaattaggtataggaattagccccataataaataaaaaaccgttaataaggaggctgacacgaatggcttatgacatcatcagcgatatacacggatgttatgacgaaatgatcgccttaatgcaaaagctcggatatgaagtgaaagacggaacgcccgtccattctgaaggcaggacgcttgtctttgcaggggatttaacggacagaggcccaaaatccgtagaagtgatgcgttttgtggcaaaagcatatgaaaaaggagccgtccgttatgtcccgggaaatcattgcaacaaactgtatcgttacttaaaaggaaaccctgtaaaagtgatgcacggactggaaacgacggcagccgaactgaaagagctgtctcccgccgacagaacggaagtctccggacaatttatccgattatatgagtcagcgccgctttatgacattttacataatggcgatctcgttgtcgcccacgccggcataaaagctgacgatatcggtaaatactcgcgtaaggtaaaagaatttgttctgtacggcgatattacgggtgaaacgcatcccgacggcagacccgtcagaagagactgggctgccgactatgaaggcaaggcgtgggttgtgtacggccataccccggtaaaacgcccccggatcgtcaaccgtacggtcaacattgatacaggctgtgtcttcggcaatcagctgacaggctttcgttttcccgagcatgaaaccgtctctgtggaaagctctatgccgtatgatgcttcacgatttcgcgaggatcacggcaggcaggcatgaaataaagcccgaaaccggcaaacggttcgggctttacatgtgttcaattaatgttttcatatcgtcaggcaccggagcgtgaaaaacgagcgtttctccggtcatggggtgtacgaatgaaagccgctcactgtgaagagcctgccgggcaattccctcattttttccgccgtacaatgtatcaccgactaacggatggccgaggtagctcatgtgcacccggatttgatgcgtccgccccgtttccagccgcagggctgcaagcgtaaacgcatgtcccgctttttccgtttgaaaatgcgtcaccgctcgttgtccatccggcgttaccatccgctcaataatactgtcgtgttttcttccgatgggcgcgtccaccgttccttccttctgcagcatgatcccgtgtacgacagcgagatatcgcctgctgacaagcccctttttctgtgctgccgacaaaagagaatgggaaagccgatgtttggcgatgagcatcgcccccgatgtgtccctgtcaaggcgggtgacaagatgaaccgttgattgcacgccgctttttcggtagtggctgatcactccgttagcgatgctttttgacgggtgttctcttgatggaattgaggagacatacggctgtttattgaccacaagcacatggtcatcttcataaagaatatcaagcggaaccggctcaggcaaaagcgtttcactcacatgctccttcggaaattcaatcttaagcacgtctccctccgctaacacggtgcggacggttacatgctctccgttcacaagcaggtctcccccgccgaatttaatgtcagcgagaagccgctttgaaatgccgagctgcgccgtatattctttaaccgtcatgccggcatcccgggcagtcatgttcttttggataaaaaagttgtccaatccgtttcctctttctattcgccttttccgataaaggaatcctgcacccttttccaaaacggaaaagggcggaatcttgcaaatctgactttttcatttgccacacggcatagaatggacttgacatccttatgcagcaaggttaaatgatcaattgtgacttgaaagtcgacgtcgtttctcggtttgatgacacagttatgatgatcgggaagcaaaagcggcgagccgacagtcctgaacactctgttgttgatagatgccatttcggcaagctgaatcgccctgatggaagggtggatgattgcaccgcctaacgccttattataagccgtgcttccggaaggcgtggacagacataaaccgtctcccctgaacgtttcaaacagctggcctttaatttccacgtcagcgacgagactgccttctatgcttttgatcgtacattcgttcaaagccagataccgctcctcacgctcttcatcatgataagtgacaatcacctcaagaaggggatactccacggtatgatacggcgttttggcaatggccagaacgagcttttctatctcctgcggaacccaatcggcataaaaacccaaatgccccgtgtgaactccgacaaaagccgttttatcaagacggtcgctgtacctgtgaaatgcgtaaagaagcgttccgtcaccgccgacggaaataacgatttccggctctttttcatccaaggtcatatcaaaatcgagtaaatacgcctgtattttgcttttcagtgtatctgaaacctcgtctccttttgaagaaacggcaaatttcatgccattcccctcctttccttcctactggcggtctcccgcttttttctttcgcgagaacgcggcttgggcttcctggatttctccgcggatttctgacatttcttcatcgagccgggatgcggcttctgaggcccgctgcagcctcagctttactttttcgggaatgttcccgctgtatttgtaattcagtgaatgctcaatggttgcccaaaagttcatggcaagcgtccgaatctgtatctccacaagaacgtgcttttcaccggacgttgtttgtaaaggatataaaacgacaaggtggtaagaccgatatccgctttccttatgctctgctatgtaatcccgcttatcgacaacggtaaaatcttttctggcaaacagcatatttttgacgatctggatatcatcgacaaattggcacataatacgcagccccgcgatatcctgcatcgtttcaatctgatgaagcggtatgctttttcgtctcgctttttcaagtatgctcgccaccggcttcacgcggcctgtcacaaactcaatcggtgagtggtcatcttcatactcataaagggttctgacgcctttcagcttcacctttaattcttcaacagcctggcggtatggcgctagaaattgctcccattgtttgtcatccatcgtacatcccccaattccgaacctgttctaaagaaatacgtttttcactttttcttccatatctccgtagtttgcattatctttaatattttcaagaagataatcgagttcttcatgcagccctgaaagttcaaccgttttcgcgccggcctcaaggaccgccggttttccttggtctaaggcttctttcagatccggccagacatgttcttttataatgacatattcaaaagagtcagctgattcaagtatgtatacaaaagcaaagtgatcggaatcaacaagcatttgacctgaggctttgcgttccgctccgcttaagtcttctccgcacttcaagcggagcgcgtcttctgttaatgatgcattctggatttcaattctcttttgcataatgttctccttttttaacaaagtacagcatttattttatcatatcaaggtcgatattgataaacgtaacctctaaagagataatgggaattatacaatttttcgtcctgaaaggaagactgtcatgacccaagaaatagaaattgaattcaaaaacctgctgacaaaatcagaatttctgaagctgagtgaagcactctgcatgaaagaatatgattttaaacagcaggtcaatcattatttcgacacgaaagatttttccctgaaacaaaaaaaatcagcactccgcatccgagaaaaagacggctcgttcgttctgactttaaaagaacctgccgcggtcggtctgctggaaacgcaccaacagcttgcggcggcaccggatcttgacgtcttcaagattccggatggccccgtcaaacggcagctggacggtctcggaatccgttcagaacacatttgctgcttcggaacgctgtcgaccgcacgcgcggaaaaagaatcagaaaaaggcttaatcattttagatcacagccgatatttagagaaagaagactttgaattggaattcgaggctgctgactgggatgaaggaaaacaggcgtttgaacaattgctcaagcaattcggcatcccagagcggatcacgaaaaataaaatccagcgtttttatgaacagaaacaaaaaaaggtggaatgacacagtgaatataacgaattgggcggcccttctccagctgcagtcaatggcgctgcaatcaatctctcatacaagcacggattcaggcggacaatcttcagaaagcccgcttgccaatttcagcgcgctgctcagccagtatacggacacagccgtccggcagcagccggaatcagggattttaaacggtgtgcggaccgctcacgcttcatattcaccgagaattccggtttcatccggttccgcggcagcttcacagaccgtttccccgagcataaagtctccgaatgcggcttctgacatcagcaccggaaacttttcaatagacagcgccattcagaaagcagccgaaaaatacggagtggacgaaaaactgatccgcgcggttattaaacaggaatcaggctttaatccgaaagcggtcagcggtgcgggggcaatggggctgatgcagctcatgccttccacggcagaatcactcggggtgtcaaacccgcttgatcccgtccagaacgctgagggcggcacaaagtacttaaagcagatgctcacgaaatacgacggaaatgtatctctcgcgttagccgcctacaacgcaggccccggcaacgtagatcggtacggaggcatcccgccgtttaaggaaacacagcaatatgtcaaaaacataacccggcagtattacgcgtaaaccagagaggcttccttcgccctctggtttttttgcggagtgaaatcttacacatgaatgaaggcgatgtgatatgatatgaaatacaagcgcctgacagaaaggcactttgtttgtagaaataaaatgttattgctaaaatatacagtaactgaagatagtaaaactgaaagataaattcgcaatgggaattatgattcctattagccatataaaggagtagtcaacatgggacaatcgtttaacgcaccatatgaagcgattggagaggaacttctatcgcaacttgttgatactttttatgagcgtgtctcgtctcatcccttgctgaagccgatatttccaagtgatttgactgaaacggccagaaaacaaaagcaatttttaacccagtatttgggcggacctcctctttatactgaagagcacggacatcccatgctcagggcaaggcatctcccctttccgattacggatgagagggctgatgcgtggctaagctgtatgagcaaagcgatggatcaggtcgggctggagggcgatattcgtgaatttctgtacgggcgtctggaactgacggccaggcatatggtaaaccagtcagaagcggaggatcgatcatattgacgaattatcagcatgagcaatacttcgcccattgccacggacatccaaaaaaaccgctcgaaatttacatgtttgtcgaccctttatgtcctgaatgctggtcgctggagcccgccataaaaaaattaaaaatcaaatacggacgttttttcaccctgcggatcattgtttccgcgagcattacatcgctgaataagcaaaagcggaaaaaacaccttcttgccgaagcttgggaaaaaattgcgaaccgttccgggatgccctgtgacggaagcctttggcttgagcaggatcagcctcttgcatcgccctaccttgccgcactcgctttaaaagcggccgaactgcagggaagaaaagcgggcattctgtttctccgcagcatgcaggaaagcctgtttgtctccaagcagaatattacggatgaagacgttcttttagaaattgctgaaaagacgaaattggatgttgaagaattcaagcgcgacctccattcgcaaagcgcggtaaaagcgcttcagtgcgatatgaaaatcgcggcggaaatggacgtcaccgtcaacccgacattgacgttctttaacagcctgcatgatgatgaagggctgaaggttcccggcaactattcttatgacgtatacgaagagatcttattcgaaatgctcggggatgaaccgaagccttctgaaacgccgcctttggaatgtttcattgaatatttccggtttgtcgcatcgaaagaaatcgcactcgtttatgatttgagtctagaagaagttgaaaaagaaatgaaaaaactggcattcgccaaaaaggtcgccagagtggaagcaaagcacggtctgttttggaaatctctggccggaacccaggaggatgtcacctgttgtgaccattaaaaaaagctgattccttacggagccggctttttttgtgcaaataaagaaaccgcgccgggataagcgcggtttcatatgtcttaacgacaacaaaggggatgggagaaatttttcacggtcaaacaaaggggtaatgtttgtttgtgatcaatttcacatccttatcatatcaaatcttgtcgagttttgacaagccataagattaatgttcatatttttgtcacaaaacataactgactgcttgttttcatagaatatatcaatcataaacaaggagggaaatcaatgctccgcaccgtattgatcatcggaatgattgtgtttttcttctttttaaacctgctggccatgatgcacatgctgccgatttacattacatctccactgctgtttctgtccatattgtttgccctgtaccggctgaatcaccgaaaaacgtttaaggggttttagaaaaagcctgcgcatttaatgcacaggcttttttgaattacgaagggttcactttcgaaagaagctcttccatttcgttcagtttctcttcaaacattttgcaggccgcctcgatcggttcaggcgatgtcatatcgactcccgcttttttcagtatgtcgatcggatattccgagcttcccgcttttaagaattcggtatagcgctccaccgcaggcttgccttcttttaagatctggctgctcagcgcttgggccgcactgtagcctgtcgcatattgatacacataataattgtaatagaaatgcggaattcttgaccattccagactgatttctttatcaatcaccatgttgtcaccgaaatactttttattcagatcataataaagttcgttcagcagttcaggcgttagcggctcgccttcctgcgctttcgtatgaatcagatgctcaaattcagcgaacatcgtctgtctgaacactgtgcctctgaatccttcaagcatgtggttgagcaggtacagacgctgtttttcatcctttaagctgttcagcatatattcaccgagcagcgcttcattagtcgttgaagcgacttcagcgacaaaaatgctgtagttaccgtacggatacggctgatattttctcgtatagtagctgtgcacggaatggccgaactcgtgaacgagcgtaaacagattattgacattatcatgccagttcatcaagatgtacggattcgtgccgtatgtaccggacgaataagcaccgctgcgttttcctttgttttcgtatacatcgacccagcggttttcaagtccttcttttaaaatagacgcgtattcctcgcccagcggagcaagtcctttgagcatataatctttcgcttcctcatatgttaccttcattcccgaatcttttacaagcggtgtgtacaggtcataaatatggacttcatcaaggccgagcacctttttccgcaggtcaatgtaacggtgtaataacggaagatgtttattgatcgttttgataaggttatcgtaaacctcttcaggaatgctgttattggataaagccgcttcccgtgctgatttatactttttcacacgggcgtaaaaattatctttttttacagtgccgctgagtgtagtcgccatcgtgtttttatactgtccgtatgttttatatacggcttcaaatgcgtttttgcggacttcacgattgctgctttccaggaaattaataaagttgccgtgtgtgatttgagtttccttgccgttttcatctttaatcgacggaaacgtaatatcggcgttatttaaaacactgaatgtattggaaggcgaagacagcgcttcagaggcttccgcaagcagggcctcttcttgttcgctcagcacgtgcggacgctgttttgtaatttcttcaattgcatgggagtaaagcttaagctcctctttttcaagaataaactggtgcagcttgtcctcctgaatcgccagaatttccggttcaatgtaagcagtcgcgctggcagcctgagaatacaggcttgcggctttgtcgttcagcccttggtagaaagaatttcccgtatcctggtctgagcgcatatgtgcgtatgcataaagtttcccaaggcggttcgtcacttcatcctgtgccgtaagcgccgcgtataaattatcagccgaatgagcaagcgtgcctttaaatgaagataaattcggaattaattctttaactgcttgaaattctttattccaggcctcatcactaggaaaaatatcctctagtctccatgtatgctctgcctttacttcacttctctcaggcagctgtgctgctttattttcctcagtcatggtgatccccctcgttttctttacttcaagccaattgaaaaaacgattgtttctccaaaaacttgtgttgtgattatcttccggcttttcactgccttttgtcaaatcatatgcggcatataagaccgagcataccaataatacagtgaaaaaacgaaaacaaaatgcttgtacgcccctcacattcgccaccaccttgacgttagggtgaacgaaatgaagcattctcattccccaaaaaagagcaggtcccgccggcgcagctcttctgccgtttgagggcgcttctgttgagatgagggcatatatacttcattctcaatttcccttaaaaaatcctgcaagcataagaaatcagcatattgttttaccgccattccgataaggctgtcttgtgaaccataccgcatccggatctccttatgcctgattttttgccgtaaatcatgaaccatgccggataatcggatcggcgcgccttttttagaaagttccgcaagccgcaagtataaatggccctgccacacaaaaacgggacttgcaaacacaaagcctgctgaaacgggaataaacacttcagaggggagaaatggaaatgcaacctgatgtctttcgtaaaaaagacgccggataagaccggcatcttcagataaaaaccgcccgcctttgttgcggaagccggtaacggcacgcccccacgaggaaagtctgacgctgcgccgcccttccggatgacaaatgtctttcagatttgctttgtgaagagggattgcggttaagccggcataagaatagccggtgtaaaacggagtgatggaatgcagcctgtaaaaggagcgggcgtcggggcagtaaaacattaaggaggaaaatgaattgacttcaaagaactgccagtgaaaagcagaaagccggaaaaattgcgcggtcatccgttttaaccgttttgccccaatgatccagaccggccggtacccggcgtttttcaggcctgccgtccggctctttaaagagtccgccgaaaggttcgcacattgaaattcaaaagccagcctttcttctccgctttctgccgtcaagtcaggccgctgtccagcggaagtcagatacggttccaggctgacactgcacccttgtgtcttcagccagagaaaaagctgtctttttccttccagatggtattcgctttcaggttcggattccccgggacacagcctgctttttttatgagcgaagtgcggcagtttttcgcgtcccagtttgatatcaagctcacttttgcaaacggggcagaaccagcgtttctttctcagctccgccgctttttcctttgaatagcttccggccagctgaatgagccgtccgccggcagtcactgcactgaacatgttgcatcttctcctttcctgaatcttgttgtattcagcaggaagaaggcataatcctgtttgcggatgagagccgttatacggttttcagccgttcatcctgtcattcagaacaaaaaaaaccgatttctgctgagagaaatcggttttttatgatgcaaagtgtttttttattgtatataacgcatgatcagcgatcactaatttgccgtattcttcaagacggtgaatgctgactgatgattcgtgcgcgtactccaacaggatgcttagctgattttcaacctcttcatcagtttgctcataaaaatctgcatataaataatatcggtcttcaaacgaatacagggtcgttttgattccgttaagattcaattttgatagcgagatgagatcctcaaaatcatcgaaccgcaaagtgaactgaagcttttgctccttatcttcccggctctcggcctgctcttctttctggaaatcatcaagtaaagcatcgagattttcatctgccggctcttgttttttatcttccgggatcggcagttcgagtttttgtccgtccttggaaagctgggcttttgttacgattatttccagtcctttgtccaatgcctgaacctgaatccaaagaggaccctcgacagcgaattcctcttcatcatgcacttcatccatgacttcccagaacagttcttcactgcgctcgcgattgtaccagatttcttctctgtcaaaaccgcgatcttcaatatcaccataagacatataaaattttacagtatgctcattaattctttctatttccattttgccaaccttcccttctttataagatgttgaagggacatctaagctcccgatgaatagtactttactacactttacccattccgtccacatcttaaccttatagaagacagcgcaaattctttatatttctattttatgataaaacagttataaaagaaataaaaaagcattttcacaccgaaaaacaggctttctcccggttcccatcataaatagcgcactgcttcatatattagctgtacaagcaatcgatctataagcgaggtgttaccatgccgcacgattacctgctgtcccttctgcttattatcgggattgaccttattctcggcggtgacaatgccgtcgtcatcgcgatggccagccggaatctggcccataaacaaagacagcaagcgatcatcttcggaacatttatcgcagtcgtcttgagaatcgttctgacgagcgctgcggtctatttattgaatgttccttttttacaatgcgcaggcggggtatttttattgtatctcggctatcagcttctgattgagaagaaagatgcgcagcatgtgaaaagcagttcttctctttggaaagccatccgcacaatcgttctggctgatatctttatgtcgcttgacaatgtcatcgcagtagccggcgcttctcacggtgagctgacactagtagtgatcggtctcttcatctcggtgccgattattatttggggcagcaagctcgttcatgccgccatggaaaaaatgcctttattgatgtatgccgggagcggtcttctcgcatttaccggcggtgaaatgattgccggagacagcaagctgtcatttttcatggcagaacacggcatgatacagatgatgctgccgattttgaccgttgtttttgttatcctcgccagtatgatttaccagcagactgaaaaataacaaaaagcccaaaccgcgatggttttgggctttttccatgcttatcgtaagcttatatcagttggcaagacgctgtgcttctcttaattggaaagaacgcacttttcttggcaggaatcgtctgatttcatcttcgttatagccgacttgcagacgtttttcatcaatgatgatcggacggcggagcagtcccggatgctcattgatcaaagtatataagtcttgaagcggcatagattcaacatttacgttcagtttctggaatactttagaacgggtagagataatttcatccgtaccgtcttcagtcatacgcagaatctgcttgatctcatcaattgataacggctcggagaaaatgtttctttctacaaacggaatctcgtgctcttcaagccaagctcttgcttttctgcatgacgtacagctaggtgatgtgtataatgtaaccattaatcttcactcctctaattagtaggatgaacatgtttgtattctcaaattgaaatgactttaaaaaaggaatctttataggtattatactataaaaaagtaagtgtgaacagtctcctgagaaaaaaatgtgtcaatccggcaaatttacggctggaggatttttccccattctcaattagctcagctgatcgaaaatgtttttttgttttttctcatcaatgactttgagaacttcatccgttttctcgtatgattctccgtaccatttttcatctttataagtgtgaatgttttcatatgtctgtttcatcgcttcaaatatttcttcttctgattccgtcttaggtgaccagtacagaatctccattttgttcacttcattcgtagccaatgaccggcgccgatacccgattgactgcgcgtgcttgaaatgctctctttgataaaaacgcaagcgtttctgtgtatccgtgtcatcctcgtcaacaggctccacctcaagcagaatcggcttgttcttctttttcagtctgccgatcagcttgcttccgaggccttgtcctctggatttctttgacacaaacaggtaatcaataaagatgaaagagtcaaattccgcatacatcagcacgtggtactgcccctcttctttatgataaacatcgctttgctcctttaacagagcttccatatgcgcttttgatttcatttcttcaatcggaaaatattcactcagcttttcgtaccagttcattcatttgctccttatgggttcgttgtcttcacacttttagatataccccatttccgattgtttaaacaatcttacatctattaagacgtgtgatcctttaacatggtttcaatttttttaaaatggtgtgtaatcgacgtttttggtataacggtttgccgcgtcccacaataaaaattcgtcaattccttcatcatgcagcgctttaacctggtcctccacctggcgtttcccgtacttttgataatttccgctgccgagatatgatgccgtgaagtcctgaagccacggacgcgatacaggcgggtgtttcagcttggacagctttttattttccaccttcgcgtattctttgacgacattgtagggctcaagatccggtttatcaatgccgaaatagcttgtccaatggctcggataaatcatggatgaaatgacatcgacctggtctgaaattttgctgaaattctggccgataccaggcgcttccggcagcgtggctgaatagccgaaaatatcaaccgacacatccgcgccgtacggcttgagttttttcttcgcataaccgacaaaatcggtgacggcgtgaacgcgtttttgcacattgctgtctgctgtttttccgtaatcgccgtgtccgtatgtcagttcgtcatcacgtttttcaaacccttcaggaaaacggacataatcaaactgaatttcttgaaaacccatctttacggcttgttttgcaatctttacattgtaatcccatacttctttcataaacggattgacgaacgattcgccgcggccgtttttccagacacttccgtttttttctttaaaggaccactcgggctttttattcgcgagttcgctgtctttaaatacgacaatacgcgcgatcggatagatctttttttcctccagctttttcatcatcttttttgggtctttgatgtacggcttggcgattttggcatactcagaatggccgtccggcttaaaggtgaggttcccgttgtcgtccttgacatcaatcaccattgtattgagctccgttttgtccacaaagtctgtcagctccccgaatttgcttcctcccgctgaatgtcctgtgacgtaaatgccccgcaccttatcaggatgtgaaaaatgcagccctgacggataagcgaaccgtgcatttgatttcggcaattctttttcagccagtgctacttttacaagcggctgctcctctttcacagcggcatgggccggataagcggctgcactgataaacagtcccgcacaaatggcgcacaaaatggttttcatactgatctccccctttttttccattatagaaaaacgggagcaggcttaataaacttgaatgtgcgcaaaaaaatcctccaagactcagtcttggaggatgatacgtttatagataggttttaaattcagcttctgtgcacatgacaaaatgtcccggtttcacttctctgaattccattttttctccttcttggagctgatgaactgccggatcgtatttctttcgcgtgcgatttctttcatagtccggatcaggaagcgggatagcggacagcaatgatttcgtatatgggtgaagcgggttttcgtaaagctcatccgccggcgcaagctccaccaattttccgaaatacatgacgccgatgcggtcgctgatgtatttgaccattgataaatcatgggcgataaacaggtaagtaagccctttttctttctgcaattctttcattaaattgacgacttgcgcctgaatggagacatcaagcgccgaaatcggttcgtccgcgatgataaactccggatcaaccgccagcgctctggcgattccgatacgctggcgctgtccgcctgaaaattcatgcgggtagcggttggcgtgctctttatttaaaccgaccgtttccagcagttcgtgaacccgctgcatccgctcttttttcgtttttgccaggcggtgaatatctattccctcggcaataatgtcggcgactgtcattctcggatttaaagatgcgtacggatcctggaaaatcatctgcattttccggttaaactccagcagcttcttgcgggattttttcccgtggacattttccccgttaaagagaacttccccgccggttgcctcatacagccggataatactgcggcccgtcgttgatttaccgcagcccgattctccgacaaggccgagcgtttcgcctttataaatatcaaatgacaaatcatctacggcttttaccgttcctttctgcgtgaaaaaatgctgttttaagtgtttgatttcgagaagtttctcagtcatttttttcaccttccttcattaaaacaggatgctgatacgtattcggaagctgacggattttagccttcaccgcttcaggcggctcgaccttaggcgcatcaggatgcagaagccacgatttcacaaaatgcgtatcagacactttatacatcggcggttcctgttcaaagtcaattttcatcgcatatgagctgcggagcgcaaatgcatcccctttcggaggattcgtcagatcaggcggcgtacccgggatggccgtcagtttttcctgatcggtgctgtccagactcggcattgaggcaagcagcccccacgtatacggatggcgcggatcataaaagatttcatccaccgtgcccgattcgacgacctgacccgcgtacatgacggcgacccggtcggcgacattggcgacaacgccgagatcatgcgtgataaaaatgatagacgtatcaattttcttttgcagatctttcatcagctcaaggatctgtgcctgaatcgtcacatcaagcgctgttgtcggttcatcggcaattaacagtttcggatttgccgcaagcgccatcgcgatgacgacacgctgtctcataccgcctgaaaattcatgggggaattggccgatccgtttttcgggcatcggaattccgacgagatcaagcagctctatggcgcgctttttcgccgcttcacttgagattttttcatgtttgaaaagcacttccgtaatttgcttgccgactctcatcgtcgggttcagagaggtcatcggatcttggaaaatcattccgatgtcctttcctctgatggcctgcatttctttttcggacatcggcacgatatcgcgtccgtcaaaaagaatctgtcctcttttaaagtagcccggcggcatcggaatcagcttcataatcgcttgggaggtcacactttttccggaacccgactcccccacgatcgccagcgtctctcctttattcaaatggaaattgacgccgcggattgcctgtacctctccgccgtatgttttaaatgaaatggctaagtcttttacttctagcaaacgtgtcactcatatcactccttatttgcgtaacttaggatccagcgcgtctcttaacccgtcgccgacaacgttaaagccgaacatcgccaggcagataaagccggcagggaagaacagacgccaagggtaataggttaatgcaggcaatccgtctgaggccatcgttccccagctcgcaagcggcgcaggtacgccgaggcccaaataacttaaaaacgcttctgtaaaaatcgccgtcggaaccgtcagtgtcatcgttacgagtatagagcccatcgcgttcgggacgatatgcttaaacaaaagccggccggttttggcaccgagtgtctgtgaagcaagcacatactcctgattctttaattgcagcacctgtccgcggacgatcctcgccatattgatccagcccgtgatcgtcatggcgacgataatggtgagcaatcctttcggcaggacaaccatcagcaaaataaccattaataatgaaggaacagcccacagaatgtcggcgatgcgcatcatcacttcatctgtgcgtccgccgcggaatccggaaatgctgccccagattacgccgatcaataaatcaagcacggcagctgcgacaccgataaagatggaaatccgcgcgcccacccatgtccggacgaatatatcccttccaaggtcatccgtgccgaaccaatgatctttcgacggcgctttatccgcatttaatagattggtagtggcataatcataccttgaaaagataggcgcaaaaatcgccatcagaataataagaacgatcagtacgaacccgaccatcgcaagcttattgctgcggaagcggagcatggcgtctttccagagggaaaggctttttttatttattttttcggcatcgccggcattagctgaagctggttcaaacatatttttaggaatgttctgcatggtctaggctcctttctttgctttggaaagcttgattctcggatcgattaatccgtacagcacgtctacaattaatacgcatagaagcaggagcacgctgaagaacacggtaactcccataatgaccgtataatcacggtttgtaatgctgtttacaaaatgcgcgcctaaaccgggaattccgaaaatggattcaatgatgaaacttcccgttaaaatggatgccgccatcggccccatatatgtcacgaccggcaaaagcgcgtttcgcagcgcatggcgcacggtgactgacggacgggacagtcctttagcttttgcagtccgtatgtaatcgctgtttaacacttcaatcatgcttgaacgggagagtctggcaatgaacgccatcggcatggaagcgagcgcaatggagggcagaaaggtgtatgcccaggattcccatcctgcgaccgggaacagttctaatttaattgagaaaatatattgcaaaatcgtcgccaatataaagctcggaactgagatcccaaagatcgttaaaatcgcaatggtataatcctgccatttattatggtacagggcagcaagcaccccgaaaagcacaccgaacgctaaagcgaggagaatagcttctgcaccgagagtgaatgagacggggaagcctgaattgattaaatcattaacactttggcctttatatttaaaagaaggcccgaagtcccacatcgccacagattttaagtagctgacatattgaacgaaaagaggcttgtccaaaccatagtgttcgtttaagtttgcctcaatttcaggcggcagctttctttcgccggaaaatggtccgcccggcgctgcctgcattaagaagaacgtggcggtcacaatcacaaacaatgtgatgatcatgtaaatgaatcgtttaccgatatatttcagcaaggtgaacacctccatgttttttacaattttatacgtaatcagtaagaaaggtatatggggacatcctccccatataccttgggtcttttgttttcagaaccggcttttattcaaaagaagcgtttctgaagtaaacttcgcctgttcctgtcaagatcacatttttgaggtttttatcctgcacccaaggatccgtatagaaataaactggcgcgaccggcattgcgtcgataaagatcttttctgcttttttcagctcttcgatacgtttatccggatccgtttcaagctgagattggttcagcagctttttaaactcaggatcttcccacccggtatcattgtttccgccttctttatcacggaacaattcaaggaagttgatcggatcgttgaaatcgccgagccagcccatacgtccgatttggtagttttggctgtgcagcttgtcgatgtaaacattccattcggagttatcaagttcaactttgacgcccaagttctttttccacatttcctgtacggcctgcgcgattttcgcatgcgcgtcatccgtattgtaggacagcttgatcgccggaaggtcagaggcactcttgacgcctaattccttcagtcctttatttaagaattctttagctgatttgacgtcattgtctttgaagtaaccttttgtgttatccttgaatcccttcattgacggcggcaccgcagccatggccgggatttgttcgccctgcgttacatttttcacgatggacgagcggtcgatcgcataagcaagggctttacggatgttaacattgttcagcggtttcgcttctgtgttgaatttgtaccaatacacgcctgcgatcggttcaacgtgaagagatccgtcttttttcaatgtcggcagagattcagtcggaagctggccgagcggcattcctgcccagtcaagctcaccggcctggaattttttcagttcggtgttgttattgttaatcatcaccatgttgattttcttcaatttcacagcgtctttatcccaatattgatcgttcttttcgagcgtgatggaaccgctgtgtttccaggccgtcattttgaacgggccgtttgacacataattttcgcccgcgtttgtgttccagtttttatgtttttcggcgattttcttgttgatcggcatatacgtatagaatgaagttaattgcgtgaaataaggtgtcgggttattcagttcaacctttaatgttttgtcatttacggcttttacgcctacatcatcaatcttgccttttcctgtattggcagcttcagcgcctttgatgtagtagagctgataagcgtattgtgattcgttgttcgggtcaagcacccatttccatgcatattcaaaatcctgcgccgtcacagggtcgccgttagaccatttcgcaccgtcacgaatcgtaaatgtataggtctttccgtctttgcttgtttcaattttagatgccattccttcttcagggtcacctttggagtttacgcgtgtcaatccttcaaaagtctgtcggattacgcctcctgaaacggaatcattcgctaaacccggatgcaatgagaacggctcggttttaatattgatattaagtgaagtctgtcctttggtgtcttttttgccgccgcctgatccgccgctgaatccgccgcacgcacttaatacaagcgagaagataagcatcaaacctacaatagaccaacgctttttcatgcactaaccccctaatcaaatttttcagcctttactactaaatactcagaaatatcagacaaaataacttaatatttttctaaactttaattgtgttccgtcttttctgattattttatgtaaagaagctgtaacaatagagtgaacaagttcattataatgaaatgaataatttattgcaatactattttctcaatttaaaatatttaaatttggtcagtttttctgtcaaaaaggtgatacacttctatagtttaaagcatgacctaactaaatttttttaatgtaatttccagttcatattgctttttacatataatattcgttatacgaaatgttgatatacgttatcatttaagctttttcagttctttttgaggatttccacccctaaagtaaactggaaataagcttgtattcctctgatgacatttggctataattgatttataatagatcaatcaaatacatttgttgtgattgcgatgatgaagagtagtacacattttcatccgtttgaagagagtctgcggtgctgggagcaggtaacgggcgatgtggaatggacttctgagcagctgaccgaacgttagtaggcccagccggagcagcctccgttaccaacgtctcgagcgattccattgtaatggaataatcagggtggcaccacggttcattcgtcccttttttctacgggaagaatgggctttttttattatgttttaagaaatgaggtaagaactatgaagaaaacgattttttcaggcattcagccgagcggttccgttaccctcggcaactacatcggcgcaatgaagcaatttgttgatttgcagcatgactacaacggctacttctgtattgtcgatcagcatgcgattacagttccgcaggatcggcttgagctgcggaagaacatccgcaatctcgcggctctttatctggccgtcggacttgatcccgagaaagcgaccctctttatccagtcggaagttcccgctcatgcccaggcggggtggatgctccaatgcgtcgcatatatcggcgagcttgagcggatgactcaatttaaggataagtcaaagggcaaagaagccgtcgtgtccggactgttaacctatccgccgctgatggccggcgatattttactgtacggaacggatcttgttccggtcggagaagaccaaaaacagcatcttgaactgacccgcaacctggcggaacgctttaataaaaaatacaatgacatcttcacgattcctgaggtgaaaattcctgaatcaggcgcgcgcatcatgtcactggctgatccgctcaaaaaaatgagcaaatcagatccgaaccaaaaggcattcatcacgctgcttgatgagccgaagcagctcgagaagaaaatcaagagtgccgtgactgattctgaaggcattgtaaagtatgataaagaaaacaaaccgggcgtttctaatcttttgacgatttattctattttaggaaacacatcaattgaagaattagaagctaaatatgaaggcaaagggtacggtgaattcaaaagcgatttagccgaagtcgttatcggcgcattgacaccgatccaagagcgctatcgtgaattaattgagagcgacgagcttgaccgcattctcgacgaaggggcggcgcgcgcaaacaaaacggccggcaaaatggtgaagaaaatggaaaacgccatgggtctcggacggaaaagaagataaaaaaaagaggcgggagaatccccgcctctttttttagttcacttttgattcctgttccatttcccaaagcttttcgaaaaacggctgccctttaatcaaattttcacagaacgcaagatgtttatccgaccagccttcaattgtttcattgtaaagcatgtcccagatctcttcaaaactcatccgtttgatctgctcatacatatgcggattccattccgtgtaccaatacacaatttccgcacggtttttcagccctttcagctggtcgagcgccataaacatcagctgcttgatctgccgctcttttctcgtcagacctctgacatgccccggcgccaatgacaaaatgtgatattcctttgaagactccaattgcgacggctcaaattgaaacgattccggttctacatcctttaccatttcataaacaagctgctcctgtctcggaatcaggcggctctttctgaccggaatggtatacccgatcgtatccacggcaatgatgccgatcccgtctgtcacgacaaaacagtactccagctttgtccgctcatgattttttcgcacgtatgacttctggtggacttggtcaagcagctctttcggaagctctgataagtcgttttctatgtaatgaaataatactgacggcactctgagcagcggcgtctgatccaaaagctcaaccgtgtcttccttccgccattcgtgaaaatggcatacattgtagccgttttcttccccttcaaaccaattgacccatacatcatgaagaaataacatattcgacccctcactttataaaaactgttgtccacagtataggcaagggatagataaattattccatttcaatatgagatttccgttttacggagctggatttccgactgcattgcaacaaaaaaatctcccgttcgtccgggagatcatttcacatttttcggatcaagcgcatcacgcagcccgtctccgacaaagttgaagcacaatacggtaagaaggatcaacaaacccgggaataacgggtaccaccaagcctgtatcataagcgtaaagttctgtgcatcctgaagcatattgccccagcttgcgatcggcggctgaatcccgaaaccgagataacttaatgtagattccgccaaaataaccgttcccacctttaatgtggctgagacgataatcggtccgagcgcattcggcagtatatgagaaaagatgatgtgatggttttttgtaccgatcgtctttgcagctaatacaaactctctggaacgaagcgataaaaactctcctcggacaaggcgtgccgttgttgtccagcctgtaagggagaaaattaaaattaatttatccattccgggctgaaaaatcgtaacaagtgtaattaacaaaaatatatcaggtatggataatacgatatcaacggttctcatgagaacggcatcgacaaaccctttaaaatatccggcaacggctccgacaactgtcccgattgtaatcgcgccgatcacagaagcgaatccgacaagcaaggagacgcgcgccccgtacagaaccctcgtaaagatgtctcttccgaatttatcagttcccattagatgttttaagctcggcggcttcaaacgattgatgagagattgactctccggagagtaaggagcgattaccgaagcgaataaagctgacaagataatgatggttaatataacggctccgattacagctagtttattttgaaagaacttttcgaaaaaaatcttcgtcattgtttccggtttggattgaatattttcctttaatttcacttcgctggggggtgtgccggtatttggctgtaacatttgacctctcacctctctttgttaatattcaatgcggggatcaaccagcgcatataagatgtccgcaattaaattccccactacaaccaaaacagctgaaatgaccgtcatggccatgataaccggataatcccgcgaaaaggctgaatcaataaacaatttgccgagacccggccaagtaaaaatctgttctaccactaccgctcccccgataaatgacggtatcatcaaaccaaaaatagtgatgacaggaagaagcccgtttctcaaaccgtgtttaaaaatcactttattatctcggaatcctttcgcacgcgccgttcgtatataatcctgttttaacacatcaagcatactggatcttgtgtatctcgttatccctgccatgtctgccgtggcgagcacaaaagcaggcagaatcaagtgatgcaatcggtcaaatatgttaaagtcagcattcaaagtgcttactccgccagtgggaaaccaccccagatttacagataaaaccatgattaaaatcaaaccgaaccaaaaattcggaatggcaagccctaaaaatgaagtaacagttatcccgtaatccaattttgaataaggacgtttcgctgacagaacaccaaatggaatagaaatcagaagagcgacaagggttgagaaaagcataagcacaatcgtattcggtaagcgggataagataagttcagaaaccggagtgcctttcttgacgatagaagtcccaaaatccccttgcagcatattccccagccatttcacatattgaacaggttccggatcattcaacccgtatttttcaatgaatttcgccctgtccgcttgactgattgtagggtccatcataagtgacatcgggtctcccggcgctgctttcatgatggcaaacgacaaaattgtaatgcctaagagaatcggcaaggacattaatgttcgccgtaaaatatatgtaaccatattcttgtcccctttttaaataggataagagaggaaaggaacctccttccctctccagggcttttgctatttttgatccagccaccatttttcaatattgtacaagtcatttttagggtggaatacatagccttgtaaattattcggcatcgctctgtggtaattgtaatagaataagaagctgtacggctgatcttcagcaattaatttgtatatctcttcatacttcttttggtattcttttctgtctgtaattgacttcgcttcttcaagcagcttatcgactttcgggtttttataccagatattattcagcccgtttttcgattggcttgaatggaagatagagaattgatccgggaacgttgcaagactccatccgagaagaagagcgtcataatcccaattaggggcacttgtctgttcgattaacgcactgaattcaacaattcgcggtttagcctcgattcccacttcttttaattgctgctgaacgacaacagctaaatcttcacgaattttattgccttgattcgttttaatttcaaatgagaatttttttccgtctttatcaaggtagccgtcaccgtcatggtcttcccatccggcttcttttagcagctgctttgcttttttcggattataatcaaatgtcggcactttagacttcggataattccatgacagcggactctcaggaacatccgctaccttaccgtctccgttcagcacttgatccaccattgcctgcctgtcaagagcgtaagtcaatgcctgacgcacttttttgtccttaaaaagctcttttttctcattccagccgatatagctgtagtttaagccgagatcagatttgaccttcacgtttccaaacgttttaaccgtatcaaaatctgtgcccggcacaacgaagaaatcaatatctcccgcttttaactgggccacggccgcgttagaatcaggaattgttttgactgtcactgtatcaaggtaaggtctgccgccaaagtaatcatcatttgcttccagtttgacatactcaccttttttccactcaacaaacttaaacggaccggagccgattggatttttacggttaaattcattctctcccagatctgcaaccggcaccttacccaatatatgttttggcaaaatgccgtaactgtcgagaacgacattatagaaataggcatcttttttcttcattttaaactgaatttcatattttccttttttcgttacggatttaagggactcaaaacccgagccacgctcaccgttgtaatccttgttaagagggatgctgtaggtgaaaacaacatcatcggccgtcagctcttttccatcatggaatttaacgccttttttcagttttacatcatacgttaatcccccgtcagcttctgttactttttcagccagcgacggcttgacgtttaatttctcatccgtttccaataatgtgctgtaaatcatgccttcaatatcagaacttgcaacatcggtagaataaagtggattaaaaagtgtgggttccccggttgacccgacaaccaaatctccgcctttttgcggttttcctgccggtttggattcggtgcttgtggattttgagccggagcaggctgacaggaagatggcgagcgccataaaaacacttagcatcatcagtgcgcttttacgtaatttcatatcaattccccctttgtgatatatatgcagcaaactggttatgtaatccggcataccccctctcgatgcttgtcatttcaggcatataaatggcaggcgacgtaatggccgggagcggcttcttcaaatgccgggatttgttccttgcagatcggtttggccatcgggcaccgcgtgtggaacacgcagcctttcggcgggtttgccgggcttggcagttctcctttcaggatgattcgttcccgcttgacggcgtctttttttctcgtgacgggcactgaagacaaaagcgcttgcgtataagggtgaagcggattgccgtacagctcgtgtttatcggtcagctccatcatttttcccagatacatgacgccgactctgtcgctgatatggcggacaacactcaaatcatgagaaataaacaaataggtcaggttgaattcatcctgcagttcttccatcagattgatgacttgggcctgaatggagacatcgagtgcggaaacgggttcatccgcaataatcagctcgggattcaacgtcagagcccgcgcaatcccgatccgctggcgctgccccccggaaaattcgtgcggatagcggtttgcaaagctcgggtgaaggccgactttcgccagcagctcctccactcgctcgttccgctcgctcatgctgtacatatggtgagtctggaacggctctttaataatggaacgcagcgttttcctcgggttaagggatgcgaagggatcttggaataccatctggatgtttttgcggacgctttttctcagcttttcttcagataagccggagatatcttgccccttaaagagaatccggccgtctgtcggcttgtataaacggatcatcgtccttcccgccgttgatttgccgcatcctgattcaccgacgatgccgagcgtctccccgcgcttcagtgaaaaagaaacgccgtcaacagcctttatatcaccgactttcctttgaaaaaaaccggagcggatcgggaaatatttttttacgtctttcagctctaaaatcgtttcttggcctgcagctgtcattttgattgggcaccctcttcctcatataaaaaacatcttacagaacggccgctttcatgcgttatcagctccggctgccctgttttgcatttgtccatcgcttttgaacacctcggggcgaatcggcagccttccggaagattatccggtgtcgggacactgcctttgatcgcttttaatgtatcaatctctccatctatcaccggtatggagtttaacagcccttcggtatacggatgaagagggtttaaaaataagtcctccacacccgcactctctacgacttgtccgcaatacataacgatcaccctgtcggcggcttcggaaaccacacctaaatcgtgagtgatcagcagaatagaagtatcgaattttttgcagaggtctttcatcagctccaatacttgggcttgtatcgtcacatcaagcgccgtcgtcggctcatcagcgatcagaagcttcggattgcagctgagcgcaatggcgatcatcaccctctgtctcatccctccggaaagacggtgcggatattctttcatcacttgttccgctctggagaatccgacgagttccagaagctcaacggcttttttagccgcttcttttttattcatttttttatggtattcaagcacttcggtaatttgttcgccgatggtcagcaccggattcagggaagtcatgggctcctgaaagatcatagagacgtcatttccgcggattttgcaatattcgttttcggtgaaggaggccaggtccctgccttccagcttaatcgagccgtccataatttttccgcccgagctttggacaagtcccataatagaaagcgaggtgatgcttttgcccgagccggattctcctacaagagcgacggtttcgcctttgttaatgtgaaaatcaaccccgtcgactgcagggatcggctgtttctttctgaaaaaataggtctttaaattattcacttctaatagtgtgctcatgatacgcccctttctcattccgctgaagcagagggaaacatacgtttcgctatcacaaaatatagaatagtcgaaaaattttatagttgtatattattacatcattattacaaaagcaagaattttttaggataaatgtaatatccttaaataatttccattcttttaatctattaaagcgttgcttccagaaaggtttttgaagggatggccaatgcttcttttactgttttttgatggtcggttaaatatttttttactatattgaatccgacggcatagccaagcattgaggggaagtatccttttccgtataacagctgggaaaacattctgctgtctctcgttaagcggaggttcggcttgactcttttttcaaacaaaaaatcaagctgctcaggcgtatagtaggacgtccattccgccgtaagacttgagccgaaccgctcatatacagcatattctgccagcccctccatcatgattgtatcaagaaatgtctcatctttttcgtcctttgtcacatgttctaaccggcagacgtgattatattcatgtgtcataagggcggatacagctgaattggaactatccgacgatagaaagaggaacattttgtcccgaaaggccagaccggattttgatccgaattcctgacggattttccggtttcgttcatcaacgggcaaaactacgatcggcacgtccggcccgttccacttctcctttaaataggcttcctctttttgtatatggctgtagcatcctttttctttcagccgtttactggtcctaacgccgtccttcagatggcggaacatgccgtggttttgcagcatcccgagtatcggcttccactctttcttatcggcccctgaaaaaagcggcaaaagatgcggggccaggtcatttacggatgccgccttttccatccattgatatgtctgcttgacgctcataccggttcgcctcctcttgttgttatcatatgcacgcacaaaaaaaccggccacctttttcaggcagccggtcaaaaactgtattattgatattttttaaagatcaaagtggcattatgtccgccgaagccgagcgagttgctgagaacgatgttgacatcctgctcgcgcgctttatccggtacataatctaaatcacactcttcatcaggtgtttcgatgttaatcgtcggcgggataatgccgtctttaattgccatgacggagaagattgcttcaattcctccggcagcgcctaacaaatgacccgtcattgattttgtcgaactgacggcaagcttgtacgcatgatcaccgaaaacggtcttaatggcttttgtctcgtatttatcattgtagtacgtgcttgtgccgtgagcgttgatgtaatcaatttcttcaggcttgatgcccgcatctttgattgcttcctgcatcgctctcgcaccgccttccccgtcttgggcaggcgcggtaatgtggtaggcgtcacccgttgagccgtagccgacaatttccccgtagattttcgcaccgcgggcaagggcatgctcaagctcttcaagcacgacgatccccgcgccttctcccatgacaaagccgtcacggtttttatcaaacgggcggcttgccgttttcggatcaggatttgtagaaagggctttgtttgcgctgaagcccgcaaatgacattcttgtcagcggcgcttccgttccgcccgtaatcatcgcatcggcatcgccgcgctgaatgactttaaacgcgtcaccgatagagttcgttcccgtcgcacatgccgtcaccgtacaggagttgactccttttgctccgagagcgattgagatttggcctgtcgccatatccggaatcatcatcggaacaaagaacgggctgacccttctcggcccttttgtcaggaagatttcgaattgggattcaagcgtttcaagaccgccgattccggacccgacccaaacgccgactctcggagcgatctcgtctgtgatgttcagaccggcatcttgaacggccattttcgcggctacgacagcgtattgcgtgaagcggtccatttttcgcgcttcttttttatccatgtgattttcaatattgaaatctttcaattcagcagctactttcgccggatactcgtccgattccacacgtgtgatcggtccgattccggatacgccgccgattgcatttttccagcttgtttcggcgtcgttgccaagcggagacaaggctccaagccctgtaacgactactctttttttactcatcttgtgtgcacctcacctttttttatcgtccccagcgtaatgctatggcgccccatgtcaatcctccgccgaaaccgaccatgacgatgacgtcgccgtctttaattttgcctgcttccagttcctctactaatgaaatcggaatggatgctgcggatgtgtttccatatttatggactgttttagacatcttttcaaccggaagctccaaacgttcccgtgccgcttccatgatgcggatgtttgcctgatgcggaatcaaaaagtctacgtcctctttggagaggccggctttttcaataacatttacactcgattcacccatttgccggacggcgaatttgaatacttctcttccatgcatgattgtatgccctttttcatctaagtacaagtgctgaccgcctgtaccgtctgctccgagctcaaatgaaagtatgcctctgtcgtcgctgaccggtccgatgaccgccgctccggctccgtctccgaacagcacagccgtattacggtcgtcccagtcggtaatgcttgagagcttttccacgccgaccacgaggacatgtttgtatgtttgcgattcaatgaattgtttggcggttacaataccgtacataaaacccgcacatgcggcgctgatatccatcgcgcacgcttttttggccccgagcttctcttgtatcatacaggaaacggtcgggaaagactggtcaggagtaaccgtcgccacaaggatcatatcaagctcctcagcggaaatgccggcctgatcaagcgctttttgcgcagcctcagcggccatgccggatgaatacatatcttcagcggcgattcttctttcttctatacctgttctcgtacgaatccactcgtccgatgtatctaccatttgttcaagatcatgatttgtcagcactttttccgggatgtaacggccgacgccaagaattccagctttcattggaaaagactccttttttataatgaatttaaaactaattagttatgatcaattattagtatcaggtactaattctaccctattttttttctgttggcaatatattcgtctaaactatcggacgctgctcctcatagaataaaaggaagacgaaaggaggcttcactatggatattttctccaaaatgatgttcggcgattccagagaccgggataaagaaccggaagaaaacccggagcagcctcaggctgaaaacgaagaagagatcgattacaaccacgtgttgaatcagctggggtccatcatgaactccctggatcaattaaagcccgtatttaaagactttgcgccgatggtgtccgccataaagaaaaaaatcatgtgaaaagccacttcatgaaaaagtggctctctttatttattcagctccccggcatcagatctgccaagctcatacgcttccgccatgaccgatgtaaacaggtccataaacggctgaatcatttccatagacagatctatgccggatttctcaagctccgcctttgcttccggcaagtatttcatcgcgatctgcataaattcaagagacttttcatgctgcatgtgtatccacctctattcatttgacggcagttcatttgtttgattatacgttttgacaaggtctgagattttgtcttgaaacgctttgtccaccagcgggctgaacgtccccatttcaacgactccttccctgaaatcaaagtcgtgatctccgctcttgagcgtacctttattatattgctcggcaattaatgtataggctttatctacgttttgcaccgtgcttgtcagcaccgtgtttttgccgagattcgattgctcggcgacatagccgatggcgtaaagcccgtcttttttgatttgctgaatgacaggaacattatacccgtctccggccggatatacaacatccgtgccctccgcttttaacttctcgtaaagatgcagcgcttcattgccgttatcccagtggtccgtaaattcagtattgacggtgatatcaggcttttcatatttcgcccctttgataaagccgtctacttcaggctgccacaaaaaggaggcgatgacaccgacctcattggtttttgacatatgggcggccgtcattcccccgaaaaaacccattgcttctcccataaggtgaacgcttgtgacattatcgcttttcgccgttccgtttgcgacgacgaattccatgtcgggataatccttgctgatcatattgaagatttcctcgtattcatttccgtgcccgtataaaagattgactccttttttatgaaaatcatctatcgcttttaaaatatcttcatcggatctgatattttctttataataaacgtcaacgttaaattcagattgtatcgctaataaacctttgtaaccttttgtgccccataccaagtcactgatggtatcggggaaaagcattccgaccttctcaatttttcctttaaacggagtttgtgtgcatccgctcaataaaaggaggacagaaaagatcatgacaagcctggtgatcaagccatgttcaaccccttttcaaactcataacatgtataattgatatacgtttattgtagcggtaatgcacataacatggaaggtatttcttaaaaaatgtcgaatattgatgaaaattgtcttttccattctttaattttttcttccgcttccgttttttgcgttttttcttttatttccagggtaataatctgattttcgtcttctgtgccgtcagcctcaagcttattcatcagcccccagaccgcgtcttctaaaaagatcctgctttctccatcttcttttgcttccgtccacggaccgtaaaggggaggaaggataatcgcttttgccgtatcccgctgaccgtttttttcccagtctccgtgatcctcactgtaaacaatccaatataaaggctcagcccttttttcaggcagacacccgctcccgtattgaacgcagatacgatcgtattccttttcaccgatttcctctattatttgaaaaagcccgtttctcgcgagccacattaaacgttcttctaaatacagctgcctcgttttgtcctccggttctgccaaaatgacatcaacgtgcacaccttcatccatcaaccgttcgcacaatgaaaggccgagaaattcatctgctccaatgatcagcgctgttttcatcacatctgccgcctttccggtttttcatacacacacaagccaaacagccctctgaaaagagatggctgttgtattctattcattacaggtctttttcatgactgcggaaaaaccggcagatggctctgtacatacgagcagggttctcaagcaggtgatacgtgatatcaatcttgcttccggtcttttcccgggcttctttatacgcgttcgcgtgcagggtgtacgggtacggcgctccggtcgttctttgccatatatgtaccggcacgcgggtgcggcagccggtaatggtctgatagctcagtgagcttgcctctttttcagaaacaccgaagctttgtgccgtttccctcagaaactgcttataaaaaaacttattttctttctctgattcaaaatgggcttgaaggtccagacaaggatctaacattgcggctgaacggatatgctccggtgaagactgcagcaattgatcggcgatgagggcgcccatgccttctgcgagcaagtgtattttcggattgagggtttcttgtttcagcacataatgaatcagctgtctggcgtaaagggcggctttttccgaaccccaatgccgtccgtataaattgctgttgaaaatggtgtaccctctgtcaagcagcgtatttaacagctggtttctcccttcatgttcgagccaaaagcttgagtcccggctgacaaagtgagttctgtcccccagaataaagatacagaagccgttcggccgatacggcagatggatgacgttcagctcagatccgaattggaaaaatctttccgttatccccatgcctgcccgcctccttttactcctaatctctctattggctatcatatgtaagaagaatgaaaacggatcggataaactcctatttgctgctatgttttggctattatcccaagcacaggaaccgaattttccgtcagacggcaagacaggcgggcacatgtcagtttcaggcgcgctttttgatgagaaaatgaccttccgcccgcgctttatgtatggtatgatacaacgtagaataaaatgaaggacgaggtggaaacgtgcggtttattatcggttttatttggacgttccttttaacacatatggcctgttatttggtcgcctccatgaacagcgcggcgtacaatttcaagcaatcatccgttattgccgtggttattgcggtgctagtctttgttcttgcggagatcatgcctgtcaaacaggatgcaaaccagcattaaataaaaaacctgctattcagcaggtttttttgtgttcacggttttcgttggtacgtccacaatctgttgtggtttgaagtttcagggaacatttctcccaccgtaagtttgattttttgcggatttttgaccatgcttcccgtttcgccgatttcaacgtacacaccgttattcggcgctttttgtcccgggcggaattgatgctgctgtcccacgtcatttcctcctttttcttttttatgtagtatgcgcttgtatgcggagaaatatcaaaaaccgctgaatgagattcagcggtttttttgttcatcctgtttgtatagaagagctttcaggagcgctttttgcgcgtgaagccggttttccgcctgctggaataccgcagagttcgtgccgtcgataatctcggacgtgacctcttcttcccgatgcgccggcaggcaatgcaaaaatgtatagtcgggtttggcgagactgacgagtgaggcgttgacttgatacggagcaaacacattcagccgctgctgcgtctcttcctcctgccccatgctcgtgaagacgtcggagtaaatcacgtctgcatcccgcaccgcttcctgcggattttcggtaagggtgattttcgctccggaaacagccgctgcttctttcgcggcattcaccgcctcttcctctgcttcatagcctttcggcgaagcaaccgcaatgtcacagcccatttttgcgcagccgatcataagtgaatgcgcgacattatttccgtcaccgatataggcgacttttactccttttaattttccttttatttcttgtattgttaacagatccgcgagtgcctgacacgggtgataccggtcggtcagcccgtttatgacgggaatatcagcatgctcggcaagctcttcgactttttcatgctcaaaggtgcggatcataatggcatcaacgaagccggacagcaccttggccgtatccgcgaccgtctccccccgcccaagctgcaggtcgctgcttgaaagaaatagtcccgttcccccgagctgggccattcccgcttcaaaagacacacgtgtgcgggttgaagatttttcaaaaatcatcgccaatgttttcccttggaaaatcggctgtatcggatgttgttttaataatgaagcttctgtcagaagcgcattgatgtctgacgggctgacatcttttaatgaaagaaaatctttgccgtacaaatgggttaatgtgtgttccgcttttattgtgtgcatgatgccacttccttttgataaagatctttgagcgatacaggctgaggtttgccggagccgcttgctaaaaatgcctttacggtttccggttcagtaaagaccgtcacaccgtgcgtcatggcttcgatccgttgtttacgcgcttcttcagagtgattgaaattaatatggaccgctttatcctttcgctctgcccatgccgggaacgcatctttgcatacggtaaatcccgcctcttgagcctgacgttccaattccgcatcacagccttccagatagatgctgccttttttctcccagacgtgcgcgtagatttttttcagtgcgctttctgcgtcaaacgcgacacacatgccttctccggtcgacttcatttccggcccgggctttacgtccacatcctgaatggcgtgagaagaaaaaaccgggaatttcactgccgttccgtgctgattttgaacctcgggcttgatgtctttaagggaagcgccggccagcaatctggcggcaagcgggatcatcggcacccccatcaccttagacacgacaggaaccgtgcggcttgcccggggattcacttcaagaacgagaatatcccctttgtcatcaatgacaaactgaatgttcataatgcctttaaaagccagttttaccgcgattttttcggcggcctcttttatattccgctgcatatcaggtgtgacagacggacccggaagaatcgcaaaactgtcgcccgaatggacgccggcccgttcaatgtgctctgtgtaagtcggcacgaatacttcatgtccgtcggaaatcagatcgatctccaattcttttcctgtaatgtactgatcgatcaaaatcgggtacggcatgcccgcttctttttccaggagctctgacatttgcgcttctgaatgaacgatgatcatgcccatccccccgatgacataagacggacggatcagcacggggtagccgattcggcttgctttttcagttgcttcttcttttgaataagccgtttcgcctttggcatgtttgaggtcaagatcatcaagcagctgataaaacagatcccgatcctccagcgcatcaagggtttcaaaggatgttccgagcagcggaatgcccgctttttccagcggttcagcggcattgatcgcggtctgtcccccaaactggacgatggcaaaatcaatgttttcatgttccgccacgtttaaaatatgttctgtcgtcagcggttcaaaataaagccggtcggcgatttcataatccgtgcttactgtttccggattgttattgatcataatcgtttcatatcccagcttttgcagggtcagaacgccgtggacggcgctgtaatcaaattccactccctgaccgatgcggatcgggcctgagccgatgatgagagcgcgttttttctcttttcggctgacatctccgtcgctttccccaaggtaggtggagtagaaataattcgtcttggcatcaaattcagcggcgcatgtatctacgattttaaacgacgggacgatgcctgatttctttctgagagcacggatgtcttcttccgtttttcccgtgagagatgcgatcatgacatccgtgaagccttttaccttcgcctgctttaaaagcgggacagacagatgatccccttcttccatcagcttgttttctaatgtgatgatatttcggaatacatggagaaaaaacgggtcaattttcgttttggcatggatatcttctatcgtttcaccgcggcttaacagttccatgacgacgaaaaatctccggtcatccggcgttaccgctaattcccacagctgattgatcgtacagccgccgagttcaggcaggcgggtgccgatcgttttcagctcaagggaggccgccgctttttgaatggccgcttccatatttctttcgatcgccatgacctctcccgtcgctttcatcttcgttccgagcgtgcggtcggcatgtttaaatttatcaaacggccagcgcgggaatttgacgatgacataatcaagcgccggttcaaagcttgcataagtagagcccgtcagcggatttttcagttcgtcgagcgtatagccgacggcaagtttcgccgccattttggcaatcgggtagccggtcgcttttgacgcgagggccgatgaacggctgacacgcgggttcacttcaatgacatagtactgtttgctgaacggatccagcgcaaattgaatgttgcagccgccgaccacatccagcgccgaaataatcgccaggcttgcggaacgcagcatctgatattcttcatccgttaacgtctgggacggtgcgacgacgatagagtctcctgtatgcacgccgacgggatcgatgttttccatattgcagacggtgatgcatgtatgattgctgtcgcgcatgacctcatattcgatttctttaaatccggcgatgcttttttcgacgaggcattggctgatcgggcttgctaacagcgcctgtttaataagcgtctgaaacgattctttcgttttcgcgattccgcctccctttccgcctaatgtgtacgccggtctcagaataaccggaaatccgatagactcagcgaagcggagggcgtcttcttcgttgtcgacgatttcgctttccggaacgggctggtcgagctctttcatcagggcgcggaactgctcccggtcttcgcctttttgaatggtttccaccgatgttcctaagagcttgacgtgatgcttcttcagcacgcctgcttcttcaagtttaacggctaaattcaatgccgtctggccgcccaaattggcaagcagaccgtcgggcttttctttttcaataatggcctcgatgctgtcggttgtgagcggttcaaaatatatttcatcggcaaacgcctcatccgtcataatcgttgccgggttgttattgactagaataacgcggtatccttcttctttcagagccatgcagccctgcgttcctgaataatcaaattcagccgcctggccgatgatgatggggccggagccgatgactaatatgctggaaatggttgtatctttaggcatgagcgatttctctccttgctggtatcactttctctagaaattcatcaaatatccactcgctctcagccggaccgggatgagcttcagggtggaactggacgcttaatacgggaaggcgcttatgaatgagcccttccactgatgtatcattgacatggtgaaatctgatggacagctcgttttcgtcaattgacgcttcatcgacgacatagctgtggttctggcttgtcataaacacccttttcgttttccggtcaatgacgggatggttggcacccctgtggccgaacggcagcttatacgtatttcctccgaaagccagggcaatcagctgatgcccgaggcaaatgccgagtgcagggaaatcactgagtaaagatgtaatccggttcatgtacggcgcaatcgctttcgggtcgcccgggccgtttgagagcacgattccgtcaggctgaatgtcataaacggcatccatctgctgatacggaatgaccgttactttacagccgcgctttacaagtgacgaggcgattgattttttataaccgaaatcaatcagcgcaatatgccggtctccgttccccattgaagtgatgtcttcagactgcgccagctccgccggattttgtgttccggatgctgcgggaatttctcctgctgttgacacagcagcgttcatcgtgccgccggagcggatggctttgacgacggcccgtgtgtccacttcggttaagagcgggatgttccatttatttaaatactctctcaagcttgagactgcttcatggtgagaaaaatgttcacacgcttcatagacggcaacagccttgacttgtggaattttactttcaaggtctttttcattaattccgtagtttccgatcagcggatacgtaaagacgatgatctgccccttatatgacgggtctgtaagcacttcctgatagcccgtcattccggtgaaaaaaacagcttcgccaacacagcaagcctctttttcaagttcaccgccgaatgatgttccgtcttccaatactaaatagcctttcatctaaagcccacctcttgatgaataattaattaaaaatatgaatttttatacctttatatcgaaaaaaattaccgtttcactgccgaatgcgcttcgatcgctgctttcagcatactgacggccgacagcatttcttcttcagaaaccgtaagcggcggaagcagcctgatgacattcggtccggccggaagcacgagaagcccgcgttcctgcagatctccgatgatgccggacacgggacctgcgcattcaatgccgattaataacccttttccgcggatttcttttacaaaaggccctgtcagttcacggttcagctgcgcttttaaaaaagagcctttgtctgccgccgcctggagaaagtccggctgaaacacaatgtccaaagttgctttcacagctgccatggcgagcttattaccgccgaaagtcgtaccatgcgtacccggcgtaaaggcgtcggcaagcttctttttgccgatcacggctccgacgggaaaaccgtttccaagccctttcgcagcagtgatgatgtccggagagatgccgaagtgctcatagccgaatgccttgcccgtccggccgattccggtttgaatctcgtctgcgataagcagcgcctgtttgtctttgcaaaatgtctgtaaggcttcgatgaattccggatcggcgggattgactcccccttctccctgcaccgtctcaagcatgacggcggcgatatcatcctcttttgaaagtgtgctgaatgccgacgggtcattaaacggaagatagtgaaagccttggagcatcggtccgaaaccggtcttgattttgtcttgtccggtggcggccatccccgcataggtccgtccgtgaaaggattgatgaaatgttacgatttttgtctttcccgttgctttacgggcaagcttaatggcgccttcattcgcttcggctccgctgttgcagaagaaaacgagatccccgcgctatgtccggcaagctttgccgcggctttttcctgaagatcattttcaaacagattggaaacgtgccatacgctgccaagctgttctttcaccgcttccgtcaccgcatcatgacaatggccgagattggaaacggcgatgccctgaataaaatcgagatacgtttttccgttttcatcctctgcgattgtccctttcgcttttttaatatcgataggccagcggctgtaggtttgaaataggctgctcatgacacgctctccttttctttaacgatttttgttccttggaagacttgattggtgaaaaacgctccttttccgtttacgatcatcacttcctcgacatcttcactcagtgccgataatgccgagtttaccttcggaatcatcccccctgaaattacgccgtcatcgatgagggcctgaatttcttgcggcgtcaaagtatccagcctgttctctccgtccataattccttcgacatccgtgacaaataaaagtttatcggcgtgtaaggctgaagcgacggccgatgccgcggcgtctgcgttgacgttcagcgtttcgaaatcacttgtcatggaaagcggagcgataacgggaatgatgccttctttcattaatgcgtggatgattgacggatcggttttttgtatttcgccgacttctccgtatttgtcttgattaaggtaagacgcttgaaggagaccgccgtcctttcctgatattcccgcggctttcagcccgtttttcgcgagttcggttacgaaaaatttattgatcgtccctgacaagaccatttccgctgtttccagcaccggtttggtcgttttccgctgtccatcgacaaattccgtttcaatctgcaatgttttcagcattcttgaaatgtccgggcctcctccatgcacgacggcaaggttccagcccgattgcataagctcttttacattttgaaaaaaatcggcggataactcgcggattacactgccgccgcacttaaaaacgatggttttcttcatgccgctcccctttgctatgtgcgatagctcgcattgattttgatataatcataggttaagtcacagccccatgcccggccgctgccggagccttcctgcaggcggactgcaatcgtaatttcatcacctgataagtactccttggcatcagtttccgaaaacggctgaggttcgttgtgtttaaacagacactgaccgccgaggaaaacttccacttgttcggccgttacgcttgccgcactgtgcccgatggcgccgatgatgcgcccccagttggcgtctgtgccgtaaacggcggtcttcacaaggcttgagccgacgatttttttggcgataatattcgcctcaaggttatttttcgcgccttcgactctggcttcaattaatttcgtcgctccttcaccgtctctggcaatatctttggcaaggtcttcgcatacaagctttaacccctttttaaatgccggccagtcagggtgctgctccgtcaggcaatcattccccgcgcagccgttcgccatcacaagcaccatgtcattcgtcgatgtttctccgtcaacggtgatttggttaaatgaaacatccgtaatctctctgagcgcatttttgagcgactgttcttccacggccgcgtccgttgtgacaaagccgagcattgtcgccatgttggggtggatcatgccggagcctttcgccgctccgccgatcgtgatgatgtttccgccgatcaccagttcataacacgtctgtttcgtcactgtatccgtcgtcaaaatggcttcttcaaatgctccggacactgacggcgcttgaccgagctgttcaatgcccgcctgaatttttttcatgtctaaaagctcgccgatcaccccggttgacgaaaccgcaacaagctccggctcaatgccgagctggctcgcgaagccgtcccgcatttcataggcgtcctttaatccttggtctcccgtacaggcgttggcaatcgcgctgttgacgataaccgcctgaagcacggcctctttttttaagctctcttgcgtcactttcaagggcgctgcctgaaaatggctttgcgtatataccgccgcactgactgcaggcgcttcgctgataatcgctccgagatctttttttgaatagcgcagaccgcagtgcacgccctttgcctcaaaccctttcggcgaagatacgccgccttttactttcgtgatttcctcactcagctgaatcatattttcgaatccctctttcgttctatggatagactggcgtcatcgtaagtcccgtttcttcctgccagccattcatgatatttaaattttgaaccgcctgccctgcggcgcctttcatcagattatctatgacagaaacgatggtggcacggtttgttctttcatccacggtgacactgatatcacaaaaattgctgccgtatacctctttcgtcgccggaaattcaccttccggcctgattctgacaaaatatgaatctttgtagaattcggaatacaattctcttacctgtgcagcagacataccagggggagcctccgtatatatcgtcgccataatgccccttgtcatcggcgccaaatgtgcggaaaacgtgatcggacctgtgccgggctgccaagccgctaattgctgttcaatttccggagtatgctgatgctcattaaccttataaattttaaaattatcattcagctcagaataatgagtgcccatggatgcttttcggccggcaccggatacgcctgttttcgcatcaacaatcagaaaagaatcttgtaaaagcttattcttcgccagcggggcgagcccgagcagcacagccgtcggaaaacatcccggattggcaatcagcttagcagtctgaatctcttctttttgcagttcggctaaaccgtaaaccgcgctttgaatcgttcctttcggcgcggccttccgcttataccacttttcatacacggccgggttttgaatccgcagatcgccggatagatcaatgaccgggatgcccgcctccgccagcttgggcgaccactctccggaaacgccgggcggcgcggctataaacatgacatcaatttcgtttcgaatcgtttctatatgaagcggctgaagtgattgtgacgctatattcctcaaatgcggatatgaagcggcatattcttttccttcgtcgctcgatgaatataatatacaatcttctgcataagggtgatggttaagaatcctgacaagttcggcgcctccataaccagtcgcgcctataatacctattttcaacgggttcaccttcttggtttttgtgaaattatttaacattataacatgaataaaaattaattcaattgtatatttaatattttttcattcattttccatcggttttcgctgacaaaaaccccctctcgatcgagggggtttcataagaaaaacaggctgatcggatcagcctgtttttttcagcatcatcagcccgcttataaaaaacagcacggagctggcgtaaaaaataatataaaccgtgaagaaatcagcgagaaacccgccgagaataatggcggcagctgaaaatacggccgtccagaaatgatagctgccgacttttttcccccgctccccgccgtcagtgtaatcggcgatcatgattttctcgccgtgtttttgcatggcgccgaacaggcccaaaagcacctgcaccacataaacctggtgcacgccggtaatgtgcgggagcgtcagaagaagcaccgccatcccccacgaattcgccatcaggaaccagcggggatccagtcttgccgacagccggccgagcagcggatgaatcaatgcgccgctcaggccgaacaagccgtatgatagaccgaattgagtgtagctggaaccgatgtttttaataaataaaatataaaacggaaagatcaggctgccggcaaaaaagacactgctctgagacaggatcagccattttaaatggttgtgtttcatgatttgtacctctgataaaaataattcataaacaagtcatcgggatcatatttgtgttttttctgaaagaacatatcgcttttcggatatgcctcgcgcatctgctctttcgtttgatacagcatatacggcagataatagctgccgcggtggcgcaacgccgtatccgtcatttttctgacaatccgcgctgcactcgcctggctgtcttttgaaaacccttcattgattaaaagaacgagtgaaaacatgtcttcctttgcgtatgacagatcggctttttcatttttttgcacgtagcggatcgtaatatttacgagattgagatcttcatgtgacagcgtcttgcgtaaatcatgaatgtacggtgcaaattcgccgacgggcacgaagtattcttgaagcacgtcggtgttgtccgtgttttcatattccaaaaatttcgattctgaccgcatgacattgttcctggagactttcacgccgttttgactgagaaaataagactgctgggttgaccagaaccaatttcttccccagtcataccggcgggagaggccgagcgcgaatttcgtcagcgccggatgctcatcttctttcagttcattgtgccgctttaattctttctggttgtctgagagtgtgtaatcagtcacatacatatcgtgcaaaaagcctttatcccctgttgcgatccgcgcgagatgcatgcgcacggcggggttgcgctgaacatgctgcgtaaaatattgactgtatgtatcagcgttcatgcgtttcgttttcatttcataaagctcatcatccgtcagctcaatatccgcgtcaaggatgacgccgaacaggccgtagccgccgatgacggctgaaaacaggtcatctttcggagtaacggtgatgactttgccgtccgcctttaaaagatgaaacgatttgaccgtatcaatcagcgaaccgtaccggatatcccggccgtgggcgttggcgctcagtgagcccccgatcgtaaaaatgttttgcgattgcatgacttttaccgcgagcccgtacggattgacatagcgctgaatatcattccacgtcgctcccgcctgcactctgatgatttttttctttcggtcgagaccgagtattttgttgtagcccgtcatgtcgagaacgatgccgtcttcataatacgtctggccgcccattgagtgctgggcgcctgcgattgagatcttcaaatgctttctctttgcttccttaatcgtttcgaccaatgtttctttctcttttcctttgaccgtctgcttaattttcacgggcatgagacggcttacatccgtcattgtccctgcctgccgctccggctctttgtgaaaggcggaaacagcgaacagcgccgtataaacaagaatgctaaggataatgagaagtaattttttcttcatgggttcctccctcgcatgcagccggtctattatatcatgcctccgtccgtttttttcctttttaacccgataccgcaaaaaaccccgaatggcgggaaacttgttttttttagtgacttgcccttctttccgcacgccggtctgcagcgacaaagcagacgcgtccggcagaatcatgtttagtacagttcaaaacggtcatccggaaaacaccaggcataaaaaatacacagaaatccctaaaaatgattttttagtcagtatataatcgatatatatgcagatgtattaccaaagggattgtttaaaacaaagatgttaaatgaggtggggaaaatgaacataaaagggatcaatcatcttcttttttctgtttcagatttggaaaaatctatagaattttatgagaaagtatttcatgcacaacttctggttaaagggcaaaaaacagcatattttgatctgaacgggctttggcttgcacttaacttagaggcggatataccaagaaatgaaatacataaatcctatacgcatacggcctttacaattgacccaaaagattttgatgcaatacttcaaaggttaaaaaatctaaatgtaaatatattaaatgggcgtcctagggataagcaagatcaaaagtcaatttattttactgatcccgatggacataaatttgaattccgcacaggtacactccaagacagactgtcctattacaaaaaagataaacctcatatgaaattttatatataaaggtttgtttgcaatccaaaacaagccctcactgtcgcttatatgcagacaaaagaaaagcacctccaaactttaggatgtacctaaaatccggggtgcattttcttattactgaatccctaatgcgatttttgcgtagcgtgacattttgtctcttgtccacggcggattccagacgatgtggacctccgtctcttttacatccggaatgtcggcgagcgcttttttcacctcgtcgacgatgatcggagcgagcgggcaccccattgatgtcagtgtcatcgtaacgtgcgtcaggccgtcgtcatccatatcaacgtcgtatacaaggccgagattgacgatatcgacgccgagctcagggtcaacaacctgctccaaggcgcccatgatgttttcttttaatgcttcttccacgttccatcactcctttttcctcagtataacgcaaaagcggcttttgttaacacctttgtgctttataaatgcttatcgaaccaggcgacggtttctaaaacggcgtatctcgggactttatgatcagcccgttcgtctttcagaaactgaagatggtcgggccggctgctgtaatgaggtttaatcgtttcataaaagccgcgggtcggtgcatacggaacgactttgtcttgaacgccgtgccagaacagcagcgggcggctgcggagtttttccggttccagactgagatcgaacggtttgagccgcgcaaacagttcatcgacctgttcttttgtgacgtcaatgtcgatgtccttcttttgaatgtggtcaatctgctgctgaaaaaatgccgtatagttcggacttcccatcagactgacgccggctttgacccaatcatacgcagccatcgcgccgaatgtcgtaattccgcccattgacgtccccgcaagaccgatccgcccgtcttcaatcagaccgcgcccttcaaaatcctttttcagcacgtcaagctcctcgatttcatttaagacaatgtcccaaaaatggacggcgagctcttctgctgacagctgttcagcgcgttcaccgtggtaaagagcttccggcagcacggctctgaaacccttttcagcaagcaggtaagcgaaatgaagattatgctccttcgcgcttgtaaaaccgtgaataaagaaaacaaggggagcgggacggtcccgattttcttcttttacaatatgtaaaaacggaatgcctgatacggtttgatgatcaataagaatcacgttgactccctccttaggataaccataatcataagtgtaacatgtagacaataaagatggtaaaaagctacactgtacataagagaaaaacagcaaattatatgacaaaaggagttatttatggagacaaaaccttacctcatcgccttagatctggatggaaccttattaaaagatgataaaaccatttcccctgaaacggcacggacgattcagacgctgaaagaagcgggccatcatgtctgcatctcaaccggccgccctttccgttccagttcgatgtattatgacgagcttgggctgacaacgccgattgtcaattttaacggagcgtttgtccaccacccgaaagacgagtcatggggacgataccacacgtctttatctgtcgatgtggtcagacagcttgccgaacttacagagacctaccaaatacataatgtgctcgctgagatcattgatgatgtgtacttccattatcatgatgagcatttaattgaggcgtttcatatgaatacggcgaatgtcacattcggcgatctgcgcgaaacggtccaagaggatgtgacgtccgtattgattcacgcgaaggaagaggacgtcgcggacatacgcgcgcatttatccgatgtgcacgccgaggtcattgaccacagaagatgggcggctccttggcatgtgattgaaattattaaacacgggatgaataaagcggtcggcctgaagaaaatcagcgactattaccaagtgccgagagaacggatcatcgcgttcggcgacgaagacaacgatcttgaaatgctccgatttgccgggtgcggcgtagcgatgggaaacggcacggatgaagtcaaacaggccgccgatcgcgtcacgggttcaaatgaagcggacggaatcgccgaatttttaaaatcctatttctccctgtgaggttttcccgctcataacacaaagccttccgcccatactaaaacagacgactcatctcgtctaaatatggaagggggacattgcaatgggtaaacgaaacaaatcaaaacggtttattcagcaaggcaaggactctgtcagtcttcatgacgcaagatttccatatcggtctacattagaggaagcacagcatgatgcagcaaaagattcggctgaaaggcaggttgacttttaatgagaaacgaactgttttctcaagccaagtcatttgtccagcaggccgtcatgattgctaacggtttcgaggacggcgaccaggaaaaagctgtctcacgcgccaaaaatgccgtgtcttccgcgtacgccaattcgacggatgcagaacgtcagcagctgcaccaatttcaggatcagctggagaaattgcaataaaaaaaggcgccccgtttagatgagggcgccgcttttttatattacttcaaatgtttttaccgttttcagtctttttccgatctgatcggacttccctaaaaacgtcaccgtcaccgtgtatgttcccggaccgggcacgttcttccacacatctgaaaagtcatacgtttcattcggcattaaggtcacggtctgaaacgcctgggtaaacattttgtcttttgaatagcggtacagttctttgtgatgttggtcatgtacggtcagttcgaatttctgccctgagctgaatgtgaaatcgatcgggctttcgcttttgttttttaaagacatttgaaattcgatctgctgatctgtctgcacaggatttacggctaattccgcttgctgttcattcatctctccggatacctcctcagcgggctccttctgcccggattgactgctgcatccgatcaataaaatgaccggtaataacaggccaaacagccacttcattctatccgctcctatcagtcttttctgaagaaaccaaagatccccgtcgtttgcacgatgtttgtgaaggctttcgggtcgacttctttcacgattttctcaaggtcatacaattcgtaccgcgtgatgacgatgatcatcatttctttctgttcgtttgtgtaagcgccttttgccggcaccgtcgtaatgcctcggaccattttcccgtaaatcgcttctttgatttcatcagctttttttgtaacgatcatggcggtcagtttcatgtggcgcgtgtgaatggcgtcaatcacccttgttgtgacatacagagcgacaagggtatataatgctttctcccatccttgcaataatcctgccgtcaaaatgataatcccgttcaaaatgaagaaatatgtgccgaccggtttatccttccatttggccagcaccatcgacacgatatcaagaccgcctgtcgaagcgccgaatttcagcgttaaaccgatgccgatagctgagatgactcctccgaatacggtattcagaagaatatcgtgtgacagtctcatttccgggagaatccccataaagacggacgtcagcgctacgcttaatatgctgtatacggtgaatgatctgccgactttcagccaccctaacacaccgatgggaatgtttaagaggaacatgagaactcctgtcgaaatataaaagggggcgtattgatcaacgacgcttgacagcagctgggcgacaccggtaaaaccgctggaatatacatttgccggtatcaggaataaattcagtcccgccgcatacagaaacgcgccgatgacgacgattgctaatttttttacttgttctagtaccatggcttgctcctccgctcattttcattattagcttttcccttaaaataaagttttgaacactattttgccaaatttatatgatatagttggcatcactctcaccaaccggaaagaagggaattatgatgacagttcaccttattgctgacagcgcctctgacctgccgaaatcttatattgaagaaaaccggatcgggttcattccgctgcacgtaacacttgacggaaacgaatatgaggacgcggtcaccattcaggcggatcatatctttcaagcgatgcgggaagggaaagttccgaaaacatcccaggcatcaccggatacgataaaaaaagtatttttacaatacgcggaactgggagaaccggcgatatacatcgccttttcctcaggtctttccggcacctatcagacggccgtaatgatcgccaatgaagtaaaagaggaatttcccgattttgatttacggattgtagattccaaatgcgcttcattgggctgcggcctcgcggtgatgcacgcgcaaacactctgtgttaacgggaatacaatacaagaaatcgaaacgtctgtaaagaacttttgcgcacggatgaaacatatatttacggtcgatgacgtcgcctatctcgcacggggcggcagaatttcaaaaacgtccgcttttgtcgggggcttttgaacatcaaaccgattctgcatgtggatgacggcaggctcgtgccgctcgaaaaattgcgcggacagaagaaactgtttaaacggattatagaaatgatgaaggaagaaggcggcgattgggcggatcaaaccgtgggaatcagctatgcagataatgaagagacggcgattgggatgaaggaaatgattgaagaagcgttccatccgaaagaaatcattcttcattcaatcggctctgcgatcggcgcccactccgggccgggcacgctcgcgatttttttcctgaagccataatttcaatgcgggcgggcatcctaacggacagaagggaggctttgccgcatgaaagatgatgacaaaaaaccgttggacaataacgccgtaaaccagaaaaagaaccggcttgccgaaaaaaaccggcaggcgggaaaaaaccagaattccaaaaaaccggaccatctgtaaaagcaaaacagccctcttgtcttaggagaaagagggctgttttttgcgcacggatgtctgttacaaagtaaaccggcggacctgatcgtttaaccgctctgtcaggctcaccagattattgacgctttccgccattttatgaaaagaagacagctgctcaagcgcggaggcagaaatctcttcgcttcctgcagccgtttcctgaacgacggcgctgatgctttcggcatgatgcagcacttgctcaccaagctgtttcgattcgatgatccgtccgtccaattgagtaagctccgccttaatatgggcggctttttgttcaatatgggcgaatgattctgacgttttctccatcagctcctgctgtctgtccgctaaagcgacgccggtcgtgacagctccggtaatagatgtgatgccgtcttcaatttgctttaccatatcgaaaatctgcgcggtcgctttggctgatccgtctgcgagcttccgtatctcctcggcaacgacggcaaatccttttccggcctcgcctgctctggccgcctcgattgcggcgtttaaggacagcagattggtctggcccgcaatgtcggaaacggtctgcgccatcatactgatgcctgccgcatgcttagcggctttgtccgcatcgtccgtcatcgtttttttgagcgccgccagtttatccgagctgcttttcatatagctttgtacatcttctttctgggcgtctgcgagcgtataggaatagccggtgatgctttcttttaacgtattaaggtcggcttttgcttcctggacgtttaacagcgcgtccacttcatcttcatttgaagcctgaatcttcatcatgtttacgatggtaaagccgatgacggcggcgaagcaaatcatcgtaacggctgcgttaacgagcagccttgtccgtaatgtcacttcagatcgcctcctttttcaatcagactgtttttcatatccgtgatctttttcgtcagcccgcctgcgtttttgacaactctgatcttggctaagtccatgccgttttccttcagtccgtaaacgatctcaccgcttttgatctccttgttgtcttttaaatctttcgccaattcatagatgacatggtcgacgtttttcactaaagaagagataacggcgtgctcggcggtgtaatattgatcgctgtcaacaccgatggcgtatacttttcgcgcctccgcttctttcagtgcgccgacacccgtgaagccggccgccgtaaacaggacatcggcttttcttcggatcatgttttgggcgatgcgcttcccgagcttatcatcatcaaacgtaccgctgatttccgacagcacgcggatgttcggtttgactgattccgcgcctttcaggtagcctttcttaaaccgtttaatgacgtcggcatctgaaccgccgataaatccgatcgtgccggttttgctcgtcatagccgcgagcgctccggctaagaagcctccttcatcctctttaaacgtgacggaggtgacattatccaggtctgatacagaatcaatcagcacaaaccgctgcttcggatattttttggcgaccttttctaaatccgcctgcatgctgtaaccgagccccacaacaagatcattgccttcccggacaagctgggtcagtcctttttcgtacgtaccggtgtcttttatttctctgtaatcaaatgtgatgccgagctcgtctcttgctttcatcaaaccttgaaagcctgaatcattaaatgattggtcgccgaggccgttgtctgtcagcatgatgccgattgttttcgttttttcagccgccgcccctcggatttgccggcacatcccgccgtgctgagcgcaagcagcagtacagccgcaaatatcgccatttttctcattgaaactctccttttgtttttttctatagttatatatcggttcggatgtcagaatattttatttcaataaaatatgtatgttcggcaggttgataaacaaatgagggcataggagcttttgagaaaataaaaaacaccggttttggttcaccgatgtttttgcagaaaatttattgtttttcgtatgtccagccgtctttctgatacactttgccgtttttcatcaggtgcccgagcgcccgcttaaaggcggctttgcttaaatgaaaccgttcgcggatatcgtcaggatcgcttttgtctccgtaaggcatcgcgccgtttcttgatctcagataggtcagaatctcctccgcgtcaaccgaaagcgcatcctgctttctcggcagcagggacatgttgacggagccgtcttccttcacctcgatgacacgccccgtcacgcggctgccgagtctcggctcttcttttctttctgaagggtgaataaacgcgcggatgccttcatcggtaatcagaaaagagcctgatgcgatcagtctgtacaccgtgcctgtcaggtctttattcatgacgtcttcctctgcatccgtaaataattcactgatgatatcctcaggcgccggcttggcaaacatgcgtccgcggcttgtcaccttcagcatgcaatacagtctgtcgcctttttgcggccagacggatttgtacggaggcaggtgctccgttgcgacgagcgcgtcttttgacagaccgacgtcgacgaatacgcccatatcctccacagcgtccgtcacttccacccatccgtagtcataaaagctgatgagcggctttttcatcgtcgccgcgagtctttcctgatgatcgacgtaaataaatacgtccacttcatctctgtcttcaatatcctctgtaatttcactgttatgtaaaagaaccgtatcctcgccgtcggttaaaaaataaccgaaatcggtttggtgatctatactaagcgtgagctgctgccctggtctcatgttatcgtccttcctgattcgcccgtatggggctgatgtttttctcattttttccaatatgcataaattcatgctttatgcagttggacatttctctttattctactataatcaactcataagtgaaatgttataggaggttttctcatggcaaaagaaagttcttttgatattgtatccaaagttgaatttcccgaagtgcagaatgcgattcagatgacgctgaaagaaatcggcacgcgctatgactttaaaggatctaaaagcgatgtaactttagaaaaggaagaacttgtcctgatttctgatgacgagtttaaactgaatcagctcaaagatgtgctgagcggcaagctgatcaaacgggacgtgccgacaaaaaacattgaatacggcaaaatcgaaaatgcctcagggggcacggtgcgccagcgcgcgaagcttgtacagggcattgataaagacagcgccaaaaaaatcaacgcggtgattaaaaactccggcttgaaggtaaagtcgcagattcaggacgaccaagtgcgcgtcaccggaaaaaataaagatgatctgcagcagattattgcagccgtccgcggggcagacctgccgattgacgttcaatttattaattttagataaattatgtgattcctattgattattgtctctattttcggtaaatttggagaaagggattttcacagttaagttttggaaacccatgacaattacatgaacgttcttatcaagagaagccgagggactggcccgacgacgcttcagcaaccggtgtaatggtttaacccaaaccatgaccaaggtgctaaatccagcaagctaaaaacagcttggaagataagaagagagacaaatgattacagagtcttcttcttaagaagactttttttatttctcttttttccttgctgaatgtgacgaaggaggcaaacaatgggactattacaagacttaaaagaacggattttaatcggagacggcgcgatgggcactctcctctattcctacggcattgacagatgttttgaggaactgaacgtatcaaagcccgaggaaatcaagcggatacataaggcttacgtggaagccggggcagacatcatccagacaaatacgtacggcgcgaattttattaagctctcaagatacggacttgaggatgaaacgaaaaaaatcaatcaggaggcggtcagaatcgcgcgcgcttcctcagacggcgcttatgtattgggaacgatgggcggcatccgcacatttaacaaaaacgcctacagcctggaggagattaaacgcagctttcgggagcagctttatttattgcttcacgaagagccggacggtctgctcctggaaacatactatgatttagaagaggcgcgcgaagtgctgaagatagcgagaaaagaaacggaacttccgattatgctgaatgtatccatgcacgaacagggcgtgctgcaggacggaacgccgcttcgggaagccctcaggtcaattgccgatctcggcgctgacataacgggaatcaattgccggctcggcccgtaccacatgattgaagcgctcaccgaagtgccgatattccgtgacacttatttatcggtctatccgaacagcagcctcccgtctttagaagaaggccggcttgtttatgatacggacgatgcctatttccgggagagcgccgtacagttccgcactcagggcgcgcgcattatcggcggctgctgcggtacgacgccaaaccatatcagagccatggctgaagcggtccgcggactttcccccgtcactgataaagaagtgaaaatcagacgggaagaagaagtcatctccgtccggaatgaacggaccgagccgggtttaaacgaaatcgccgctcaaaaacggtcaattatcgtagagcttgatccgccgaaaaaattgaattttgacaaatttctgcaagcggcggctgaattaaaagaaaccggcatagaagcgctgacgctcgccgacaattcattggcgacaccgcggatcagcaatgccgcctgcggttcattgctgaaagaacgccttgatatccgttctctcgttcacattacatgcagagaccgcaacatcatcggccttcagtcacatttaatggggctggatacgctcgggcttaccgacattttagccatcacgggcgatccttcaaaaatcggcgactttccgggggctacctccgtctatgatttaacgtcctttgacttgatcaggctgattaaacaattcaacgaaggcatttctttatcagggaaaccgctcggcaagaaaacgaacttttccgtagccggagcatttaatccgaatgtccgccatcttgataaagcggtaaaacggctggagaaaaaaatcgagtgcggagctgactacttcgtgtcccagcctgtctactcggagcagcagctcattgacattcatcatgaaacgaaacatctcaaaacaccggtgtatatcggaattatgccgttaacgagcagccgcaacgcagagtttattcatcatgaaatcccgggcattaagctgtcagacagcatccgggaaaaaatggcgctcgccggcgaagacaagcaaaagcagaaagccgaaggcctcgccatcgccaagtcgcttctcgacacggcgtgcgaactgtttaacggaatttatttaatcaccccgtttctccgttctgatttgacatcagaacttgcagcttatattaagcaaaaggatgaaaagcgggctgatgtatatttgcattgacgcggaagatgccgcctgatacgacaggcggctttttcatggtacgatacagaaaaagaatcaagcaaaggaggattttttcatggttgaagtaaaacccatcaccgcagaagacacatacgcgatcagacacagcgtgctgcgcccccatcagacgattgaggattgtaaatatgatcaggacagcgtcaaaggagcatttcatctcggaggtttttacgacgggacattgatcagcatcgcttctttctacccgcagaaccagcaggctttacaggcggcgcccgcctaccagctgcgcggcatggcaacgcttgaagaataccggacgcaaaaagcgggaagcacgttaatcgcctatgcggaacgaaaactggcagatatgggggcggcgcttgtctggtgcaacgccagatgtcacgtgaagggatattacgaaaagctcggctggaaaagcacgggcagcccctttgacatacccggcatcggcccgcatgtgatcatgtataaagaactcgcctgaaacaggcaaaagcccgtggcatctcttataagggctttgttttgttatctttcggcgtgccggatgacgttcaaacggaatgaagcttttataagcgccgctattgacgcgatcccgctttgatattaacctttgttcagtaaacaacacgcaattcggcaagggtgggcaggggcgaaaacgatatctgccaattgccgatttcagctattatgtttagaaaagggagtatgagatgaatacgatccaaaaaccgaaaatcccgaaagaattgccggtgctttctttcactgaagcgcttcaggatgaggagctcaaagaagtcatcattgaaaacggcatcgtaaacggcaaactggacggcctgcgcgccgaaaaagtcattttcagaaacaccgtttttacggatgtctctttcagacatatggaatgtacggatgtcctgtttgacaaatgcgatgtctcaaacgctgatttcagcggaagcatcatccatagaacggcgtttcagcattcaaaacttctcggcttgaatctggcggattccgccatgcgtcatgtacggtttgaagactgcctcgcaaattacagctccttcagctattccaatatgaagcatgtccgttttgactcgtgcggcctttcagaaagtgagtggaatgatgctgttcttgaatacacagatcttgacgtctgtgatttgaacggcgcaaacttcatcggcacgtctctttttaatatggatatcagcacgtgcacatttgatcatctgcacgtctcgcttgataagctgaaaggatgccgcatctctccgtctcatgccgttacattcgcagaagcgctcggcgccatcgtgacgtgattttttattaaacgaaaccgcggatacaggcggccggctccccggcatcctgaatcaatgctcggcattggtgatgtggggtgctgctttttattttgcggcgcttttgtttcgataaaaggaattcggccaggtcatgttgaatgtaccggaaggaagagggggaattggaatgtcagacattttaaagctgtatcactaccatagatgggccaatgagcaagttattcagcatctgaagaccctgcccgcggcaagcttacagcaggaactggatagtgtttttccgactttgaacgccgtgcttgtgcatatatgccgggctgattacacttggcttcacgtgctttacagagaaacttacgaacaaatcgtctcgcagtttgatcaatttgaaaagcttgacggagattttgaggcgattgaacatagaatgactgaactggacaaagaatacagcgaatttttaagagaatcggagaacatggaaggcccgatctccatttctcatccgcgcatgggaacgcttcggacgacatatgccgatgtgatccggcatattgtgaatcacggcacataccatcgcggcaatataagcgcgatgcttcaccaaatgggctataaaggcgtgccgactgactacatttttttctcatatgaattataaaaaagcaaaggcatgccgggcctttgcttttttacttcgaatctatcataatccggcatagccgggggcgcccggggtaagctttacaggccttccggttttaaaagattccgtcgcggcgatcccgatttttaagttaatcgcggcatcgatgtctgtcacaatcggcgtttccccttttttcacacattcggcaaagtgctcaagctccagacggtaagcgtctttaaagcgggcttgaaaatccggaataatttcgtagctgctgcctgactccgttaaaatggtgacatggcttttccgcagcgtgccgactaaaatgcttccctccgtcccgataatttccgcgcggatgtcatggccgtacggagaatttcggcttgcctccacatcgccggccgcgcccgaatcaaactcaagatatgttaatgcctgatcgacatcgccgcactcctccatgaacgggtgctttaaaatcctcccgtgcccgctgacagacgtaacctcggcattcatgagatatctcgcgatgtcgtaatcatgaatcgagcagtcaatgaaaagccctccgctatgtttgataaattccgcgggcggtgcgccttgatctcttgtaaatcctttataataaatgggtctgccgatttccccggcgtcgattcttcttttcgcgtcggcgtatgccggatcaaaccgcctcataaaaccgacctggcagatgacgtccgtttcttcgatttttttcatgacttttatcgattcctcaagactcagggtgagcggcttttcaacaaagatgtgcttgccgttttcagccgccttcatgatcatttccgcatgtgtgcttgtcggcgtgacaatgatgacggcgtcaatcgtgagatcttccagcagttcatacggattctccgtccatttggcgattcctaattctttcgcacacgcttccgccttccccttcatcgggtcacagacggccgcaagctcggctccccgcacttcgccggctaaatgcttcgcatgaaaataccctaatcgtcctaatcccagcaccgcacacctgacttgatctgtcatctatcaccgctccttttttcttgaggccgcatgccgtaatggcgcaagcggtttctcttattaaacagaaatcattattttgaaagcgctttatttacaactcaagctgtttgctttctttgcttgcaatccgcagtatttgcgcaagcgctttctcaaaagctgttttaattttacaatgcttttcgctcgtttgacaatgtttttcacagaaaaaaacgcgccttatcgctgagggcgcgtttttaccggtgccgtagaatgcctgatgacgagttccggagataaaatgattttgctttttgtttttttcttcccttgaatctcatcaatgagaagttcaacgacacgccgccccatttcgcggatcggctgagaaatcgtcgtgagcggcggtgccgtcatttcagcgagaatggtattgtcaaagccgatgacggacaagtcttccggcacccgaatgccccgggagcgcgccgcctgtatcgccgcacatgacaagacatcattaaaggcgaaaacggcggtcggaaggtctctgtcaaacagctcgcccgctgcctgttttccgctttccagcgaatattccgtcggtatgatcagcgattcatctagtgtcatccccgcttcccgcagcgctttttgaaaacctttgattctgtctctttcacccgtggtcgaaccgtttccgacgatacaggcgattctttcatggcctaaagatatgagatgctcagccgccgtatagccgccgagaaagtcatcgataatgacgacgtccatcggcgcgagcggtttatcctgcgtaatcatcgcaagcgggatgcccgatttcacaatatcatcaagcgccgtgacgctgtcatcatgatcaagtcccgtcgcgaatataatgccgtccgcctgcttctgccgcagcatcgaaaaatacttcgtttctttttcaggctgataatcggtgctgcagataatgatatgaaacccaagtacaccggcgctgtcttcaatgcttttcgccagttccccgaaaaacgggtttgaaatgtccggggtgatcaggccgatcatattcgtctttttgcccgtcaaagcggatgcgtgaacattcggatgatagtccatctcctccatgacacggagcaccatccggcgggttttgtcactgatcctccccgtattgttgatgacccgcgagacggtcgagatggagacgcccgctttttcggccacgtcgtaaattgtcattttcatgcttaccgatccctcttctgttctctggtattaggtcagtccgttttccggcttacgaatttgcggtattcaagcggcgaaatgccttcaatctgtttaaacagtttggaaaaataggttgggtcctccatgccgatggcgtccgcgatcgcccccattttgtcattggttgcggacaaaagacgtttcgcctccgtcattctgactttgttcgtatactggccgggcgtgacgccgagcacctgctgcatgcagcgggtcacgtagtcttggttgtaatgaagtgccgaagagagcgctttgatggttgttttctcctgatagtgctcctgcaggtaccgggcggcctcccatgcgactctttcctttgcggacgggatttggaacgcttctttctgaagatggagcagcagctcttcaaacagaatctgctttctgagcggcaggtcggagttctcggcgctttcatctgtcagcacactgaattgcccggccataaactgcgggcgtctcaccttccctttttgcggcagggacaagcggtagcgggacggctcttcaaagctccctttttttcgcctcagctccgaccagttgttcccggtggtttccgtcacctcataatccgctccttcaaaatgaagccacgaataggatgtcgtttcttcactgccttttgttccgtaatgttcaagcccgggagaaagcagaatatattctcccgcttcaacggaaaaggcgttttcgtcttctgtaatgtagaggacgccttctttcacatacagcagatcaaacaccgggaagacccgtctcacatgggtttcgccttttttgaacactccttctcccgcagcgataaagaccgggaacggagggactgtgaactcgagaaaggacatatttccggccctcctttttaagtcggatttttgcaagaagtttcgtttctctccctttttattataagaaaatggaggtacacttttaaacgttgattttttcaggaaaggggttaaaagaaatgaaacaagcgattttaaaacgggctgcattcaaacaatcctctgatcacaaactctcattatacgcgctgacttggccgatatttattgaggtttcattatatatgtttatgggaaacgccgacactcttatgcttagccaatactctgacaacagtgtggcggccgtgggtgtcagcaatcagattttaaatttaattatcgtgatgttcagctttatcgcaacgggtacgacaattgtgatttcacagtttttaggatctaaacagaaaaaagaggcgcaggaagtggcttatgtatcaataggagcgaactttgtcatcagtctcgccatcagcgccgccatattttttgcggccgttccgctgcttcatgtgatgggtctttccaatgaattgatgccggatgccaaagtctttttgcaggtggtcggcgggctgtccttcattcaggctttgattatgacgttcagcgccattttaaaaagctacggtcatacgaaggatacgatgttcgttacgatcgggatgaatattttaaatattggcggaaactttcttgtcattttcgggccgctcggccttccggtgttaggcgtcgccggtgttgcgatgtcaacgtcctttgcgcggatcatcgggctcatcgcgatgattgtgatcgtcaaaaaacgcatcggactcggtctgacatggcaaaagatttttcacgtccataaagagcacttgcggaaactcctgaaaatcgggattccgtctgccggcgaacagctgtcttataacatttcacaaatggttgtcacttattttatcgccattatgggcgctcaggcgcttacaacaaaggtttatacacaaaacatcaccatgtttatcctgctgttcggaacggcgatcagccagggcacacagattttgatcggcagatatatcggcgccaaacggtttgacgacgcttatgaccgctgcatgaaaagtctgtactgggcgcttggcattgccgctttgacatccgtgatcatgaccttgttttcaaagcagctgatcggaattttcacaagcagccctgacattattgcgacggcgagcatgctgatcgccatgacgatcattcttgagcccggccgttcatttaatgtcattatcatcaactcgctgcgggctgccggagatgcaaaattccccgtctacatggcgatgatttccatgtggggtatcggactgcctctcgcttatctgttcggcatccatttcggattggggcttatgggcatctggatttcatttatcgcggatgaatgggtcagaggcattcttatgtacagaagatggcggtcgcggatttggattcaaaaagggattgcataaacgccccgagcttcgttaagaagccgggcgtttttttatgcctgcgaaagccgttttctcatgtcaccgagctctgaccggtaatgtgccagcaaaccggtaacggcgggtcttgagtataacggaaacagctccagctcttcagacgcctcctcgaaatacgcctcggcctcgaatgcgatgtactcccatacattcataaaagctttgttgacggtatggctctccagctcttcttccgtatagccgaattgcatcatcacctggcgcgggagacgctttttcgaccactcatccgtatggaccctcagaagcacccgggtcagctgaatggctgctcctaatgaaacggctgcatggcggagtttctcttggttccggcgcgcgcaaaccggcagcagaagcaggccgagggctccgcctgtttggcccgcgtacatcagcaggtcatcaaactcttgatacgttactttttctctgtcagagatgtggccggcgataaactcacgcaacggctcttcttcaagtgcaaattgctgccgcacatcagtgagcgcctcccacaaaaagccgtcggcgcgtgccccgttcagaaagtcttgtgccgcctgttcaaatcccccaagttcctgcatatcaagccgatcagcttcgtgaaacaaagcaagcaccgcccatgcggcccgcctgttttttggcggcagggatgagaaagtccgtttatataaaggaaagtgcacctcggcaagatgggcgcatgtttcgtattcggtcatggtatcactcctctgttttttagtgtaccatatgtttcacaataaaaagaccgatatccttcagcggaaaccggtcgcggcactgttattcttctatatcgatacggtacgcctcaaaccatgtatggatctgggcaagatgggcgatcagctgcgggcctttcatcagctggccgaaccacggcacctgaaaagatgaaccttctgtctccagcagcatttccagcttctttctgtcaagcagggtgtgaagcacggaatctttctgttgtaaaatcgttttcagccattctgtgaccccctgcgtgtatttcgggtgatgcgttttcggataagggctttttttgcggtacaaaatatcttcaggaagcagtccttcaagcgctttccgcaaaatgcctttttcccggctgccatgcattttcatttcccaaggaatattccaaacgtattccacaagtctgtggtcggcgaacggcacccgtacttcaagacttgcgcccatgctcatgcggtctttgcggtcgagcagattggtcataaaccaaagcatatttaagtagaacagctgccgtctcgctttatctgttcccgtctcaccgtctaacagcggcgtttccgcaatggtttcttcatatctcgcattcacgtattctctaagattcagccgtttttgccacttttcatccaagagcgtgaccctctcctcagtcgacctcatccaaggaaatccgtcttcttctgccgcggtgtgaaaccacggatatccgccgaaaatttcgtccgcgcattctccggaaaggctcacgacaaaatcttttttaatttcccggcagaaccataatagcgatgaatcaacatcagccatgcccggcaggtctctgacgagaacggattcctccagatgttcaaccagctgatcctgcgtaatcacgcacttatgatgctgtgtgccgaatgcatttgtcattttatcgatccacgggccgtcatcattcggctgaaaggcgctcgctttaaaaaatttgctgttctcctcataatcaattgaataagtatgaaggggatctcttccttgtttctcaaaatgagcggcggctatcgcggttatcgcgctcgaatcaagcccccctgataaaaacgtgcaaaccggcacgtcagatacgagctggcgtgtcactgcatcctgaaataagtaccgaatgtgagcggcggtttcatcgaagctgtctgtatgcttttcgctctttacattccaataacgccatatggacaaaccgtcctttgagaaagtgaacgcatgggcgggacgcacctcgtgaattcctttaaacaccccgcagcccggagttctggacggcccgagtccgaatacttccgcaagtccgccgctgtctgtgcgggctttcacatcaggatgagcaagaatggctttcaattccgacccaaacagaaaggaagagccgtgttctttataaaaaaacggcttgacgccgagccggtctcttgccccgaagagccgctttcgcttttcatcccagatggcaaaagcgaaaataccgttcaagcggtccacgcactcctcccgccactcaatatagctgtgcagcagcacttctgtatcagaggtcctctcaaaacggtggcccctcgcctgaagctccttccgcaattcctccgtgttatacagctcgccattataaatgatggtgtacgtttcctcttgatgcgtgcaggccatcggctggcggccgccttcaatgtcaacgaccgaaagtcttttatgtccgaataaaacatggggctctccccagacgtttgaatcatcaggccctcgttttgaaagagtgtctatcatattgttcataatatgtttctcttggacgagctgcttttgaaaatcgacccaacccgcaattccacacatgtgatatcagctccaatcccgtttctgtcggtttcaaattcgtttctatcagcactttacccagtttatgcaaagaaacgcagatagttgatttgtcccactaagagttgtatgagacaagcccgatttggaaagaacggaagagaagaaacaaacaaaggagacgggcacggttatgaaacgaaaacagcttttctcagaaaaaaacaaatgggggcgcggcacactgatgatagaggacggcatctgcctcgtcgaaaacgatgaaggcgatatcctgcttgcagacagtctcggaaacgcagacgtattgatgaaacgcgacggcagatggcagccggcacggatttgcggcggttcggccgaaatcggcgcagacaccatccccctgctcggcggggaagaaatccgttatgaaaaggcggtcaaacggccgctgttaaccttgctcgattcgctggacgatgaaacgtttctgctgtttctcagccatctgcacgggttcggcctgtctgtatatgattgcgtattttcctataatcaggcgctgttttccggtgaaggcgtttcgttttatcacttctcggcggatgacgcacaatgcgccctgcagcatcaccgcggcagctcgggtaaacacgacagatttgaatggacggcatctgacgggcggcgctccattatgtattcagcggcaagacaagacggcaccgcgtaacaaacaggcggcaccttttaaataggtgccgcctgatgtattcagctttgtttttcacgctgattgacggccggcgtttgcttttacccttcacagccgtagcttttgcggcaacaagagtgattgacgcttttggcatcctggacatctctttcgcctcatcaacacggcatttctcattcagcggcccagttgcgcaactaaaaaaaacccggatgcatccgggtttttcaagcgattgattaaaatacgtgaaaaccgatcggcaagtgaaggcccagcagcaccgtcaggacgagcacgataataaaaccgatccacagtccgccggttgatttgccttttttcttgcggatgacgagcatttccatcagtccgatggtaatgatgccgagcagcatttttcctgcgtactctccgttccaattcgcaaaacggacaaaaagctcagctccggtcagaataataataatgtagaataagcgcagaatcatatgcgtaatttttgcgcccttcgcttttccggcaccgtacagcccgtagctgacaaacaccaggataagcgcaacgacccatgaagtaatatgccaatgtgtcattatgttcaattccccctatcagatcaatctgcctcatttatggtaccacaacaagccgctcggagcattatcaatcgtgcgaaagacacacaattatccgatttggttcgacagcgtgccgatcggttcaattgtaatgtcaatgcggtcccccggctttaaaaatttcggcggcttaaacccttttccgacaccggacggcgttcccgtcgctataatgtcaccggcttcaagcgtcatcccttttgacagcgtctcaattaattcagctatcggaaaaatcatgtcacccgttgatcctgattggcgcagttctccgttcacccgcgtttcaactttcaggctttgcggatcactgacggccgacttatgtacaatgaccgggcccatcggacatgtcgtatcgaggcttttgccgataaaaaactgtttatgttttttctgcagatcgcgcgctgtgatatcatttacaattgtatagccgaatatatgatcaagcgcatgttctttggagatgtgcgatccgctttttgatatgattaccgcaagctccccttcataatcaagctgctccgttacatccaagtggctgttcactgtttctccgtggcctgtaacggcagccggggctttcgtaaaaaccatgggatgctccggtatatccgcctcactccccatttcaacggcatgatcacgataatttttcccgatgcagatcacgttctttgaaggtctcggaataggcgcgcaaagctttacgtcagacagcgcatacataaatgaacccgactcgtcattcggttttttcgcccattccgcaagctgtccggcatgcgcgacgaacttatctcctttttgaatgcactcgatcagcgaacccggaatcgtctcaagttcaaacaattttttttcagccttttgcagatctaagattttgtcatcatcaataatcagaccgacaaattttcggctgttcagttcccctgttgcaaatttcatgttaatcccccatcatttttaaatggcattcctttatgtattcttcctccgggcgggaaatccctcttttaaacaggctgaaaataagtgtaaaagagtatcaaaaattgtcacttttttagtcatattgacgaaataaaaccttcttggccaaaatgggttatactattatcatcctatgttttccaaaataatcgagaattggagatcacacgatgaacaaaattgaagaaaaaagattaactttattcgagacagcgcaaaaattcggaatcaatgcgacggagaccatcaggtgcagccaggagctggacagccttttaaacgggtgccggggcgggctcatccaacaaacgaaagacagcgggccgaacccggccgcacagattcagcacggccgcgaaagaaaagaggctttctcataaacgtgatatgtatataaatctgtatcatttatgtataagacccggcatctgtaaagcgccggtgttttttacgtctaaagttttttccgctcacaaaaatgtgcatttgtcataagctattttaggcaggcagcccagataagctcctggagtgcagtcatgaaaatcttcacgaaaaggatgtgctcgtatgcccgcaattgtcggagcgtttaaaattaatgccgtcggtacgagcggagtcgttcatataggcgactgcatcaccatttctccaaaagcagaggttaagacatttgccggagcgggcagcttcaataccggagacaatctcacactgacgaattacaggaattcaacgaatgtgtacgataatgatgtaatcgatcagccgatggcaggaaacgcataaaggaggcgccgtatgaatttttacgtcaatcagtcgatccatatcaattacatgcgtgtagaatctgtcagcaattcctccatactgcaaatcggaagcgccggttcaattaaatctctttccaatctgtacaacacagggagttatgttgagccggcgccgcctgtcaccgcggggcagcaggctgtaacaacagggggaggtcccggcacctcatcatttgtaccgctccagccgccaagccggtagttttaatgaaggaaacgagacgcgaggtgaatgtcatgtatgatcaatccgtttcatcctacctgcagaatttaaattctttcgtccagcagcaggcgcagcagattcaggagctcgaacggcagctgaaagaattccaaaatgaaatttcaacgctgaagcagcagccttctacaagaatcgatcggctcgagtataaatttgatcagctgaaaattgaacggctggaaggaacgctgaatatcggattgaatccgactgatccgaatgccgtgcaaaacttcgaagtcggccagacatctccgcaggtcggaatgatgcagcaggaacaggcgggccagcaaatgcagcaaatccgtcaaaacgtcgatatgtacctgaatgaagaaatccccgcgcttttagagcagctcgaaactcagtatgagagcaggctggacgaaacgaacaaatatcatattattgaagatatcagaaagcagatggacagccggattcagtattatctgtcccatgtcccgaaagaagaaaatacggcgcccgcgcaatatgccgagcagattgccgaacatgtgaagcgtgatattgtcagggccgtcgagcactttattaaacacatacctggtgaaatgaaaggtgatgatccgtcatgatttttacagtgattaaccggaatattgaagtcggcgacatccggtctactggtgtatccagttcttccttattattaatcggcgacaccgattccgtctatctgtcttccatctttgacacgcctccggaatctcttattatcgggccttatgtgccgctggcgccggaataatgttaaagcgcatttcacgcctccggaacgccaaaatcaattcagtcgggattgcgagtgtctttcaagcaggcgatacgaatgaaatcaatatgcggatcaaagtattggccgatcagcgcagtcttgctgtatacagagatgatgaaggctcatttaacaaaaaagaataccagatctttcggcagccggccgtcatgccgttaccggaaacgggagtccaaagcgcattctgccatgaaaatccttcaattcgggtaaggaatgtgaaagttcaaggggtatcgtcagcgtccgtggttcaaatcggatcgacgtcggtcgttctgggagattcgcggctgaaacatattaggcagatcttcacgccaagctcacaatcacagcagccctgacatataatgacggtgagacttctataaagggtgtcgtttatgccagcaattaccggacctatagctatcaattccatatcgggcggagtcgtaaactttggtgattccttttacctttctccaaaaagctcttctaaatctgcgctcggttcgggagcaggcaataccggagatttcctgttattaaacaacgttgtcaatgcgacaaactatatagaccccgatgtcagcgatcaaaatgtggtcggaaacgcctaaaaagcagccgctctttcagaagagggctgcttttggttcagcgttattttcgttcatttgctttttttgtttttacaagcttttccggcggctgttttctgatccatttcacaaaccgcgcgagtttcgggtcacgccgcagctcttctattcccgcgagccttgccgcaagctcctgattcgtatagagcgcgtgaacctgtttatgacaagggatgcagagcattgcggtcggaaggaatgtcccgccttcttccttaggcgttaagtggtgctccgtcagccgcacataatggcggccgcataattcacatgtaccctcggcagaatcggccataattccttctcctttctacatgatctccaatgtgacccgggtgcctttcccgcccggttcggacggatgaacgattaattttttcggcagacgcgctctcagctcctgcacatggctgatcactccgacggataagttgtccgattgcagcttttcgagcgctgtgacaacggtgtctaagagcccttggtcaagagtcccgaatccttcatctaagaaaaagaattgcagcgggtattgcccccgcagctgaatctgggcggacaaggccagcgcaagcgacagcgatgtcagaaacgtctccccgccggaaaggcttgatacgggccgtttgacgcctccgttcgcgtcatcacgcatgacgaaaccgccttctgaatcgactaatatggcataccgctgccttgtcagcgctccgagacgggcagaggcgtcccgagccacgctttccagctgttcttccgctaaaaattcgacgaatgtattgcctttacatacagactggagcttatcaagcctgtcaatctgtgtctgccagtttttcagttcggcttcaatctctttaaagcgcttatgctgtttttgcataaccgcgaaggcttttgcctgtgctcctttttcctccatggcggcgcctgactcagcctctgcctgcttcagcagagaaacggatgctgtccattcttcctccgatatccggcgctcggctaatttatcagtaacacggctgatatttgccgatagctgttttgaggtgtccagaaactcatcaatttcttttttcatttcctctgcacgcccttgcggaagcagactttttttaacttggtccggttcggtaaacccggtgtcttttgacctcacgcgccagtcgttttgcgctttctcaagagaggcctcagcatccctgagtgacatgagactccctgattcccggccttttgcgtcattcagcgattgctgcgcctgcttcagcgcatcgaatagggactgttcttttgattttaacagctgtaattcctgccgcaccgcttcaagctttgcggaaattgatgtttcttcagctgctgttccgagctcttgttcatatccgtcaatcacctgctgcaggcgctcagacgcatagtgaagctcgagccgttcccgttcaagccgatgcttcatctcctgcaggcgttctttctcctcttcatgttccttgaggaatgcgatgcttgtttcaatgcgcttctcacattcttctgcctgcctgtccttctcatctatcgaagcctgccaggcgtcaatccggtttggcggaatatgaccgcagacttcgttgtactgattcaatcggctttctgacagcgattcaagctcttctaatgaatgtctgagacggtcggcttctttttcctcgtagcggattcgttcggcaagctgctcagcttgttttaccgtctgctgatgcgcgctgatcagtcttgcgaccttctcttttaccgacagcatatcctgtttcatttgtttccattccaagcggacggcgctgaacgcttcatcaagcgggcgtccgctgatggaagaagcggcttccagctccggaacccgggcgctttgcagaaacggacattcttcggtaaaacgccccgactgttcttctaatgcaaccttggctgtcagcacttcctgagaaagagccgccgcctcagaaagcagtgcttccacctgctgcaaatgttcctgcacagcggtatcaggcgagaatgtttcatgagcggaacgcgggcggtcatgctgcgtcgagccgcatacaggacaaggctttccttcgatcagtttttccgataattcttttgttaatgcagccgttctcgcttcctctgagcgcctgcggagatcggcttgcgttttttcagcccgttcggctgcggctttcagtgaacgttccgtttcacagaccatatggtaaacggtttgcagcgtttgataagcgcgcgtaatgtcttcctcttccgttttcgctttcgctgtgagcgactcgctttctccgttgagcttctccacgtttttcagctgcgttgtcagattggcccgctctttcgtgatttgttcctgtgtctgctgaaagcctgccgccagctgtgctgcggtctggcattttttccgttcatctgcggtcacttgaactgctttcagctcttctttcagctcattctgcctgttttggccgcgggtcaggcggtctttcactgcggccagctgtttcgaggcggcttcgtattcttcctcttttttgctgtgctccgcatttgttttttccgcttcttttttcgcttcaagcagtttttgttcaatggctgaaagtctttgatacagctcttcttccttgacaagtttcggctcctgttcggccttatgggcgcgccatgcttcataggcttcattttgccgggtaaatgaaacggtttccgcctctgatttccgtttggccagttcgtgttcctgttcggctcgctgcttccggcggacggcttcggtgcagcggtctgcgtacggctcaagggcgagagctgtttccgcctctttaagacgctcagtcaaatccgtgatgtacgggcgtctttcctcaagctttttctcccggcgctcatattcatctctttctgtctgcaagttccaaatttcctggtgattttcaaaacgctcttttgcccggacccgtttcttctcagctgcttcaagccgttcgttcgcttcgtgaaactgctgttcagcctgcttcagcgcatcttctcctgcgtctccgaggccggattgttcggccagcatttcattttttttcgctgccgcttcctgcgcccgccgccgcaattttttgacaagcctgtcccgtactgttccagattaaacagacgctggagcatatgtcttctttccgcgcctttaagcgacagaaactcggcaaactttccttgcggcagcacgacggctcttgtaaagtcgtcaatggtcaggccaagaagctcctctacctttttgttcacttcattcgctttatcggccagcaccgtttgttcgtctttgatttcaatcagccggcagagggcggtttttactttcgtttcatccgttctcttaaaaacgcgctcgaccttgtaggaaacccggtggccggattgaagcgcgaatgtaaatgagacggcaagctgatcttcggcatgattcagaatgccgtgcgtattatttgcggcgcgctccacttttccgtataaagcgagtgtcatggcatcaaggatcgacgattttccgcttccggtcggcccgaaaatcccgaacaccccggctcctgacagtccggcaaaatcaatggtctgttcctccctgaagctgtggagcccttttatcgttaacagaatcggcttcatgtcgcatcctcctcatcatctgctgacgcaagctctaaaaacagcttgaccatctcctcatccggcacgccgccgcccgtttgtttttcataaaacttcttaaatcgatcctcaattgatgtgtgtttcacttcaatccggtcattttcggtctctttttcttcaaaaaccggcctgatatggataaagccgggatgcgcctttctcagccgatgaatttcctcgagagaaagctgatccgtcaaatggatatcaagatcgatccaggcattccggtcacgcccttcatcaagccagccgtgaacctcgctcagcccctgcgctttccatttgacgagcggtttaccggaagacaggaaaatctcttcccacttcgcttctccgccgggcttcgcttctaccactgtcaccgatttggcataaccggcttccgaaaagctgtatgcgagcggagagcctgaataacgggcagccgtcttggcgcgcttgatcgtttgcggacggtggagatggccgagagccacgtaagccgcatcagccggcaggctgtcagcggcgaccgtgtaggcgcccccgacttcaatcggacgctctgaatcggtctgatttccccccgcgacataaatgtggctcgccgcgattttcacggcatcgttccggcacagtccgcacatgtgagcaaacgcctctctgattttcacatcgtaatgatcgcgaagaagcttttcctcaaacgtatcagaaagcacttcgtttaatctcgcctctgacggatatgccagcgcggctacggctaacagctcgtccgccgacggcacctcaatatggacgggttctgtccgcggatagccgattaaatgaatgccgcgctcatttgttaacggagaagccgccgccagcctgtcgggattgtcatggtttccggcaatgacgacaaccgggcgttttccgccgtcagaaagcgcggaaagactttcgtaatacaattgttcagcgagcgcaggcgggttgaccgtatcgaatacatcccccgccataatgaccgcatcaatgttttcttccttgacaatggtattcagctcttccagtacttcggcctgctcgctcagccggcttctgccttccagcgttttgccgaggtgccagtcagctgtatgtaaaatgcgcataccgcattcacctcactttttgatagaaaaaaagatccgctccaaaaaggagcttcggatctcgttacagtgtaagaacgtgacctccatcgaagaaatagagcgcacgccctttcactttcgtttttgtaatttgttcaaccgcttttgtatacaattcgatttgtgtttcatatcttttttgcagaatcggagccgcgccttcaaatccattccggaatttcccctctatccgatctgttttatagtccagcaaatagagaccgtccgcagtttcgtagaggcagtcaataatcccttgcacgagcagcggttcaccggccgtttcggcatccttgtacacctcgccggccggaagcgccatactgaacggcacttcccggtcaatccgcagcgccccgagaaggtctttaccgatttcagttccgaaaaaccggacaatttcttctatatcaatggcttcctgctgctcttctgtcagcagctctttttcgtaaagcatccggaccgtccgctctgcttcttcggcagtcggaatgtgcgtcagcggtatgtgctgcatcaccgtatgcatcgccgtccctttttcggcggctgtcagcccttttttcatcataaaaccgggacgcctgtataaaagcgtgtctcctgacggtttgatgagagagcggccgctgtattcatcctcgtactcttgctttctcttcagctcagaaactgactgcttcgttctgatagccgtcagctctcggtacggatattcccatttaagcagacggcgcgcctgatcatcaaatgaaaacgaaccaggaatcggctcgccctgctgtatcgccttgagacgtttgctcttttcttcagcacgttcttttggattctcttccagcaattcactttgctgcagcatccggatgtgaaaacgcgacgggtcgcgcgcgatatcctcagacgaagaaagtcccggcgtcctgtgcgcctccatgtcacggtggcggatgagcgccggcccgataaagtccaaataagatgacgcctgatagcggtcgaattcagaaagaagccaatcagcccggtctgcttgggcctgccatttggccagctgtttttcccggtttttgcaggaaccgacgagaaacagcttttccttcgctctggtcagcgccacatacaatacgcgcaattcttcggataagagctctctgcgcatctttttcttcatcgccacaagcggaagagtcggatagctgattctgagttccggatgaatatacttcgtgccgaaaccgagctctttatcaagcaggtatgatttgttgagatccatcatattaaaacttctgccgagtccagcggtgaaaacgacgggaaattcaagtcctttgctgctgtggatcgtcatcagccgaacgacatcctcctgctcgctgagcgcacgggcggtccccagatcatcgccgcgctcctgcatccgttcaataaaccgcaaaaagcggaataacccgcggaacgccgtcgcttcgtacgagcgcgcccggtcatacaagacgcgcagattggcctggcgctgctttccgccgggcatgccgcctgcatagtcaaaatatccggtatcgcggtatacttcccaaatcagctcagacaccgaatgattcgtcgaaaatgaccgccacttttgcagactgtcataaaaggttctcagtttttgatacagttcatcatgcctgtcaccgttcgctatatatgctttcagcgcttcataaaacggcgcttttttcttttcaaggcgtatcagcgcaagttcattttcgtcacagccgacgatgggcgagcgcagcacggaagcaagcggaatatcctgatacggattatcaatcaccttcaagactgaaagcgccgcagccacctccacggcttcaaagtaacccgacgtcaaattggcgtacaccggaatgccctggtttttcagctcttccattaattgcggcgcccacggcatggagcgcagcaaaatcacgatatcccggtactggatattccggtgtgtttttgttttcccgtcatagaccttaaacggagacgagacaagctttcggatctccccggctatcgctttcgcttcccaatgcacggtttcaaagtcttcggcatcctcggagctgtctgcgtcatcagcgctgtcaatcagcagcagttccgtttttgccgcgtcattcggcggatacgatgcgccgagcttcaatgccgcctgttcatcgtagtccacttcgccgatttttccgcccatcagctgcttaaacaagaaattcgtactgtccaaaatatcggaacggctgcggaaattttggttcaggtcaattttctgccccgcgccttccccgctttctgtaaaccttttatatttcccgagaaacagcagcggctcagcaagtctgaaacggtagatcgattgtttaacgtcgcctaccataaacagatttcccgcctcttcatccccgcttttcacaagctgcaggatagactcctgcacaagattggtatcttgatattcatcaaccagaacttcatgaaactggtcttgataataaacggccgcttcgctcggcacccgccggccttcttcatcaaccgcagttagaatcgccaggcagtaatgttccaaatctgagaaatcaataattgatttttcttgtttcgccgcttcaaatcgttttccgtacgatatcacgagctgaacgagcgtttcgatgacaggcttcatatctgttaaactcttcaagtgatcttgcggacttcttgtaaagtaatcggtctttaacttttcgatcagtttcttcgcgccgtttcgcaaatcggtcgcttcgtccaaaagcgctttgtcaaattcatcaccctttaccggcttcgcccgcttaaatgagactgcggggacccgttcatacagcgcatcgaagtcatgccggcagctgatcagctcttctatctgctgaaggtcatccagaaaattaccagcgcgcggggccggcccgccgggcgcttttgtcagttcaagcgccttctcaagcttttgttttgccccgaagagcgccatttccgcatcttctctcacatactggtaaaacggaagctcttccattttgctttcttccgtcacgtcatacaagcggacaaagctctgcagccacgcttccgggtcaggatgcgaccgggaatactcgtacacccgtttgacaaggtcttgaagatccagatcatgcctgtctgtcgtatatctgtctgcaagctcaaaaaacgcctgattcccttttgcgtattcatcttcaaacagctcatcaagcacttcgtctccgagcaattcgccttccgtctggtcagccatgcgaaaaccggggtcaagatcaatcatataataatattttttaagcacttgcagacagaaagagtgaagcgtcgaaatgctcgcccgatttaatagagagagctgccgtctgatatgcagagatcccggatttttggcgagctctttttctaatgcttcagcgatccgatgcttcatctccgctgctgaggcgtttgtaaaggtcaccacaaggagcctgtcaacatcaacaggatcttcctccgcggttatctttctgatcatccgttccacgagcacggccgttttacctgatccggctgcggcagcgacaagaatatcgcggccggaagaaacgatggcgctccattggtcatccgtccatatgctgtctttcggtttaggaatttgcatcatcatccgcctcctttttcagccaatccagtatggtgccgtctttttccgctttcaggctgcggtattcattttccttaagcgactcatcaaactggcaaaccgatttaaacgcacagtacgtacaaggcgtcttatctttcagcttatacggggtaatggacacaagcccgtccgttatcgcttcgcccgcctgttcaaatgtccgccgcacgtggtctgtcagcagatgaaagtcctgttcgctgaccgccgctgagtcggatcttaaagacccgtcctttttcaaaccggcattgacgatatttgaacgcccttcctccaaagtcgtgtccatcaggctgatcgcctcccggtcaccgaggagaaggcctttcattttaaatttcttgaaaatttcctgctcgatttcatcaagccccatcggcagactggcctgaatcatcggatcatggatatggaaatacaaaacgcctgccggggtcgctttcatgccgagccaatccgcagaatgtgtaatcgataagtcaagatatgtgagcatttgcagagcgagcccgtaatacacctcagccagatcaagccccctgtcgcttgatttataatcaacgattctcagcagcaggccttttgaactttccgctttatccacgcggtcgatccgtccgacgagttccatcgtacagccgtttttcagcgtgaaagtgagcggaggcagcggtccgcttccgccgaaaccgagttcaagaccgaccgggacgaaaccgctcgccttcgcatgctcgcttaatatgccagaaacacgcgtgacgatcttctgcagtttttccttcacgtaaaagtgtctgtttgagctgagcagaatctctttttgcagctttggcgcaagccgttccaccgcttcataggagaaattccggcactgatctttcgtcagatcgcgccattccagcttctgctcacgaagccggtctgaaatcagcttcagactggagtgaaacagctggccgatatccggcgcttccagcttgaaaaactgccgctcttttaattgcagcccgtgagatgcaaaatgagaaaactggcaggcattaaacgcctccatccgggaaacgcttcctttaatatgctcgccgtaaagctggcgcgaaacaggccgttcaagacgcttcgcctcattgcggaaaaataggcttgaaaacagctttttcgcacgctggtgatcagactctttcatcagcacattgtatgcgctccaccatacgtcactgatctcgtactctcttgtccacagcctgagctgacttgccgtatacgtctgagccacctgtttattgacgagatactgaagctgctcttcttcgcttacctgctcgggatcagccgctgacagcttttcctgatgatcgggaaacagctcgccaagcctgtttacaacgattgacggcaggagcgtttttccttccgcatcggcaatcgggtatgacacataaagacggtcagacggactcgacagcgccatatagatgagaaaatgctcatcaagcagccgctcacgccccgcggaagacagctccactccgaccgctttcagccactcccggtcatcatcagacagcacgccgttttcatccgggcgcgccggaagaacgccgtcattggccccgatgacgaatgtgcaggacgtgccgtatattcttgagagatccatattccctacaaatacttggtcaagcgcaggaggaattaaagaaaaatgaagcgattccgttcccgtttcaagcatttgctggaacagcgccaaagatatttcatcttcacccatcatgccggcaaactcctcgagaagctggataacggcatcccacgcctggccgtgctgctgcgcttcgatcatgtttccggcctcttcggcccgctgccttttccggtccagcttcaggggaacatcggtatcttccaaaaagagataaagagcctccgccatgctttgaaccgttttcgcttttttcatccggttctgcagccggataaggggtgcagctatccactctctcgtctcattcagcatgtgttccatctcgatttcctgatccgtctgcgcgaaatcctcatcgagcgatacgaagcgcctgtatacaaaccgctcgccgttcgtccagcgctcccctttaatgccgtaggcgatacagtaattttcaagctgatctacctgctctcttattttctgctccggctgatcaagcgggaataacagttcggttttcgcacagcggaacaccgcttcatatctccagttccccttcacgacatccaggcttgaacggatgaattcaataagcgggtgatgctgcatagaagcttttccgtcaataaaataaggaagcccgtaatcggcaaacacttccttcagcaaatctttataatcttccggctgacggatgagaatcgccatatctttgtaccggtatcctccgtcccggacaagcgattgaatttcccgggcaataccttcgagctcagctcttctgttttgcgcctgcatgacggtaaaagcttcctgtccgccggtatacgcggcggcgggacgcacatcgtactgcgactctatacaggcaagctccggcacatgccgatgccgcttcgtgccatgcagttccttgcaggaaatatcggcattcaattcctttgccgtctgataaagcttatagtatgtgcttcccgtcattctgaacagatcgagctcatccggtgcctgttccgccgaagggctgtccgccgtcagcgagaatgtgacatgttcagcatgcatgatcagctgctccagcacccttaattcctgcggcgtaaattgatagaatccgtcgacgtaaacacgggcgccttttacaacgtccgccaaaggaatctgctgagcgagcagcgtcaaatagtcctccgaatgcagatagtgtccggcgaggcttctttccatctgctgatataaaatgcctaagtcatgaagtttttcagacagcatccgctctccgcgatactctgacgccgttccgctttccgccatgcggcggacgtcttcaggctcaatacagtatcgcttaaactctgtcagcatccgttccacctgctcagtgaatccggctttgtcactcgctttttgatacactttaaaatcgtgcttatgttcttcaatcagtttccttaaaagcatctgcacacccgtcgtcgtcacaaacggacggttcatgcccccggtatgctgaagcacgcgccacgccaaacgcgaaaaactgaacacttgagcgcgtatcatgcctccgatatccggcgttttagcaagctcatattccattaaaaacgtcatttgatccgggactagaaaaatgatcggtttcccgaacggctcccggcgcagttcatcttgaatgctgtcgataatcagcctcgttttcccactccccgatctgcctactaaaaactcaacacccaaattagaagacccctctctttttatctttctacattttatcgaaagttgacgaaaatgaccaatctcatctgctggtaaaaacgggatgactgttttaaaacatatcgtttttgaccaaattaaagaaaaaaaggattaaatatgatgtcagaatatcccgaagtgattgtgcgaacgattctgtcgttcagcattctgtttatcggcgcccgtatactcggaaaacaaaccatttcacagatgacgctttttgatttcattgcggccatctcgctcggcgccatcacagccaatctgtcgtttaatacaaaactgccgattcattttactgtcagtgcttacacgatttttgtggttatcatttatcttgtcgcatatctttctatgaaaaacagaactgccaggggtttctttgcaggcaaaccgaccattatcattcaaaacggaaaaatacttgagcataatatgaaaaagatgcgctataccctcgactacttgaaccagcagcttcgtgaaaatgatgtatttgacatttctcaggttcagactgccatcattgaaacaaacggcagcatgtcagtggaggtcaaaccggaatttgcgcccgttacaagacaggatctcggcatctttgccggacatgaaaagaactttgccgttgagctgattatggacggccggctggtaatgaaaaatctggaagaaaaccacgtatcggaaaaatggctgagagaagaattggataagagaaacctcaaaccggaagacgtcgtatacgctgtgcgcggaagcaacggccggctttttgtcgacacatacgacgaccatattacatcgccgctggatcaagaataaaaatgacatccgcacatgtcacgggctgccgccgtataataccctataaacatccgggggtgagtccaatgcacgagaatttttttcattatacagccatctgcagtgacgattctgtgcttataaaggatctggtaaaatccataaacggtgaatacagcgctgtgatttgctactcaatattagccgaaaaagcgccgaccgcagaaatcagaagacgaatcgaacatatcagagaggaagaagtgcgccacatgcacgctttctcttcactgtatacgtcaattaccggaaaacagttgacgccgaaacagacggagcattgtccgcacacatacagagaaggactgagggcggcgttttatgatgagcagaaaacgaatgatttttatttacaggcatccgatagagcggtgcatccggaagcgaaacggttatttgcccgcacggcatttgacgagcagcgtcatgccgtctggtttttatacgatatggcccactctcctttccaccatacagggggaacggtatcaaactcgccgaacacaagctacaccgaggtaaataccggaaaataacgattcagacgctccccgctgggagtcatagacggcaaaccccgttctttcaacaggagagaatggggtttatttttcgagccgtttttatacttccactaaacaatggataacttcttcattgtatagtcagcaaaaaccctttataataaaataaaccaactggtcggttttaaacgaaccgagccccgctttgccgggacaacgatatgaatgaggcggaaaggatctgtgtgaagtgacaaatacaaaaggcggtgccggaaagagcgaaaagacgaagaacaggctcgtatccgcttcgcgtgacttatttgcaaaaaaaggatattcagaaacatcgattcgggatattttagaggcggccgagatcagtaaaggcaatctttatcaccattttaaaggaaaagagtttctgtttcttcatatcatggaagaggatcaccgcgtgatgatcgagacgtggagggaaatggaagctgatctgaaagatgctgccgaaaagctgacgggctttgcggagctgctcagccggatgagcatcaattacccgcttatgagagcaagtgaagagttttatgcgagtgcgtttacgtcagaggaggtcgtaaagcggctcaacaaaattgatattgaatatgacgatgtgatgagagagatcttagaagaaggaaatcaagacggaagctggtccattcatcatgtcgaatcaaaagtaaaaatcctgctatccgtcttctacggtttagatgtgttatataaaaacgataccattcagcaaagaatcgaattgcaaaaagaagccatctccgtgtttattcacgggtcgatcaacgctgataaactgaatgacagctgacaaaggagaaacaacatgcaaaaaccgatcagagaacaaaaggctgtactcatcatcttattaagcaacatatttattgcgtttttaggcatcggattgatcattcccgttatgccgctgtttatgaatgtgatgcacttgacgggcagcacaatgggataccttgtcgctgccttcgccgtcgcgcaattaattgcatctcccattgcggggagatgggttgaccgtttcggcagaaaaatcatgattctcgccggactgtttttgttcgcattatccgagctgaccttcggattgggcacacatgtctccattttatatttcgcaagggtgctggggggcatcagtgccgcttttatcatgcccgccgttacagcgtatgtcgcagatattacgacggtgcaggaaagatcgaaggcgatgggctatgtatctgccgccatcagcacagggtttatcatcgggcccggcataggaggatttattgccgatcacggcgttcgtatgccgtttttctttgcggcgggaattgcatttatcgcagtgatttcctctgtctttatgctgaaagagccgttaactaaagaagaacgcgcaaagcagatggaaagcgccaaagaatcaaccttcttaaaagatttgaaaaagtcgattcatccaagctacttgatcgcctttatcatcgtttttgttttggcattcgggctgtcggcgtacgaaacggtattcagcttatttacaaaccataaattcggcttcacgccaaaggatatcgccattattattacgttcagctccattgtggcagtcctcattcaagtgctcgcgttcggcagacttgtcaacttcctcggggagaaaaaagtcattcagctttgtctgatcatcggcgctgtgctggctttcgtttctacggtgatgtcagggtttttgcccgtgctcgctgtcacctgcatcattttccttgcgtttgatttactgcgcccggcactgactacttatctatcgaagatcgcaggaaatcagcaggggtttgttgccggtatgaactcaacatacacgagtttgggcaccattttcggcccggctctgggcggtattttatttgatatgaatattcacttcccgtttctgttcgcaggtgtggttttatttctcggtctgggattgacgcttgtgtggaaaggaaaagcgggcgaggtttcggagtagggtgcactcacccatctccggagctttttttatgttttcgataagaaaaatgaatggattatgagaaataattcattatttatttatctcaaaatctatactatagtaatagtaaggttaacgagcttaacaatttaatatgaatgtttcaggaagaagggttttcattgaagaaagacaaacatctccttacggatatctggtttattctcatcagtgcggcagggggtttcttctttcgcttacagggatgtcgatcgcctggatgctcggaacgcttgccgccggctgcatcctctccatgacgaggcccggctggctgttcatggcgcctgacagaagagggattcaccgcagatggcttgcggcgggacaaatgatcctcggcatcgaactcggccagaaattgaacctgtccgttctgtcggttttacgggagcattggcttccggtaggcttcatgctgattttctctatcgtgatggcgcttgtttccggatatgtgctctttcggttcagccggacggacatgatgacaagctttgtaggaacggcgccgggcggtttatccgccatgccgggtatcgcccaggaagtcggcgcaaacaccgcgattgtaagccttattcagctgacgcgcgtccttttggtcgtcatgacaataccgtttctcgtcattttcttatttaccaaacaaaacggtgcggctcagacatcagccggagccgtttcagcaggagcttcacatccgggccttattcccgtcttgttaacggccggatttattttagctgcctggcttgcaagtaaaggcgcaaaacggctgaaattccccgccccttggctgctcggcagcatgatcggcgttgctgctgcggaaatcggcgtgtccgccttggcgggcaaagacatgctggcctggtggccgccggaagcgaaccagctgtcacaaatttttctcggcgccacaatcggatcaaaaatgtacaaaagcatgttcaccggtgtgacgagagtgctgaccgtcggatttatttcttccgtcggattaatcgccgccatgattctgagcgcggttgcggtttctaaattaacgggcatctccatgattacatctgttctcgccttttctcccggcgggatcgccgagatggcggcgacttcgatcaccctgcacgaagactcgactttcgtcgtcgcggttcaggtcatccggatcgttctcgtcatcgccatgcttccgcccttctatcggctgctgcaccacctttctcagctgaaacgggcacacggcgaaagaggccgggcagaaagaggaacatgatccgaataaaaaaacacgcatccatatgcgtgttttttatttgaacagctctccgccgccatttacagaccgccagtttgctgacagatcacggaacagccgttcagcaaataacagttcttcatctgtatagcggtctaaaaacgccaagagccgctgttttatcaattcatgatattcatgatgaagggaatgcagctctttcccggcaggagtcagccggaaatagacttcttttttattgtcactcagccgggttctgcgcagaaagccggcttccaaaaacttcgcgcagcttctcgacacggtcggctttgtcgtcttcattttttccgctattgacgtgacattgatcggttcatgatctccgatacacgacaaaatgtgaatttccgtcaaggtcaattgtaattttttcccgtttccttcgcggagttcatccatccgtccggccaacgacgccctgatatcctcctgacacctctcctgctcgtgaaaaatatcggtcagcccttcaagaatcatgtgttttgcatggtctggctgtcttctgtccaactgctgagtcacccttccgtattgattgtttcttttactataacgttttgttacataagaaacaatcacacaggcgcataaaaaggttatcagatgaataatccccatctctccaaaccggccagaacggcttcttccgcttcacgtcccgagccgccggctgcccatgccgcatggccgtccggccggattaaaacggtgtggacgtcattccaatcggcacgtgtttcagcaagctccgccctgactgccgccacgctgtccgtatcaataccggcgggaatgctccctcttaatgacagaagcacaaagccgcccttgcggagaaaatcatacagccgggccggccgcccgtcatgaagggtcagttcgatatccggcaggcgttttccgttcagggtatgcggcggcagctccgcatccggttcataatgcagatcaagcgcggatacttttcccgccaataaacggttggactcctgaaaatccagcaaagcggtcatcgtttctcttaatgccatccccgactcggtaaaatccatgagctttatctgcgttttgatattgtgcagcacttcttttcctgtgctgtgcctttcctgatgatagctgtccagaagatgaggcgccgcttttcccttcatttgcgccgccagcttccagccgagattgacggcatcctgaagccccgtattcaggccttggccgcctgcgggaaaatgaatgtgcgccgcatccccggccacaaaaatccggccggagcggtactgctcagcctgacgctcggcattgccgaaccgcgacatccataccggatcactcaatccgaaatcagtgccgcatatccgccgcaggtcttctttcagctcatcttcggtgacccgctcttccttccgcttttgcgggacatgcggagaaacgatgaggacacggaaaagtccgtccgtaagagggataatcacaaccgatccctccagccggcacgttgaaaaaaaggaagattcgggcggatgtttcaaagcggcatcacaaagggttcctgttaagtcggcatcagtgcccgaaaaagcgatgcccgcctgtttccggacaatgctccccgctccgtctgtacccgcggcatataagctgtgaagagtgcggattccgctttcgtcccggaacaccgtctccactccgtcatccgtctgggtgacagccaccgcttccgccccgcggatgatgtctgcgccgagacttgatgcatactcctccaacatccgctccgtttctgcctgtggcagcattaacgaataattctgcttcgtatccagccgagaaaaatccagccgtgtatccagcatggaaaaatggccggaagacaccttcgtccctttttccaagaagcgttccaatatgcctctcatggcaaaaagctcaagtgtgcgcggatgcatgataagcgctttggaatacggcatcgtcttcttcaatcgttcaatgacagtcgttttcactccggccagcgccagttctgatgcaagcataagcccgaccggacctcccccgataatggcagcctgtgttttcatttcatcagccctctttcatatttttgttgcgcgcgtaacaaaaatatgaaaaataaaacacctccttttttgtttcgcgcgtaacaattttcattatagtctttcctccgctttttgacaatcatttccgaaaaaaagacgccgttcacttggcgtctgattcactgatgactccgacaatgtctttatccttaatcggaccgaaatgacggctgtcgaggctgtatatgcggttgtcgccaataacaaagtattgtcccttcggtatgcttttgcgcccggtcgtttccttcagcgtataatcaccagtcacatggctcccggcggacaatgatgactttaacggttttaaaaacggttccgccacccgttttccattcacatacagctgatcctccctgtatgcgattgactcgccggggagcccgatgacacgtttgatcagcactttgcggtgcgggcctttaaacagaacaatatcgaaacggcggatcgttttgtaacgatgggaaaacttgttgaccatcagctcatttccttgtttaaaggtcggattcatgctgattccttcgactttataatcaataaaaatggcattctttaattgtatggccaaaacaacgataagcacgccggctataaaccaaaatcgttttttcaagattcctgtctccctccgtctttctcatgctgactgattctcgtctgtaaacgccgttcgatatgctttccggcataccacagcaccgcgatcaccattatggcgcccgccatcctgaaaggctgtgtaatgagtgcgtgaagatcatacccgataaaactgatcataaagatcataaccattttccccatcgcggctgctgatataaactgcagcgcccccacccgtgacagaccggcaacgatatgaaccgcagcggacggcgtaaaggggaagcaaagtaaaataaacagcggaccgaaaccgtgccgctcaacccagagcatcatccgccttatggtctgatgcctgcggatgaaaccgaaagctcttttctgtccgaaacggcggacggcataaaacatcagcatcgatcctgacgcagacccgagccatgacagaaaaaaaccttcccacaaaccaaatgcattcgtattcgccaccacaaatacaacgagcggcaaaaacggaagaaacgcttcaataaaaggcaatacagccgcagccgccgggccgaaagctctatagctttggaaccattccgtcagctgttcctcagtcaaatatgataaaaaatgctccaacgtttatactccttaacgagtttgtctatccttattctacacattatctccaaaaaacgaaaatgtttacgagattttccgtcttgaaatatcgtgtaagcgagtataaaataagaacaaacgttctcttttttaagaaagaaggagtatttatgcctgacattcggagcggcacccgcgatctcatcgaaaaagggctgtttctgcccatggcggccgccatcctgaaccgggacctcgaagcgcttgattcgtgcccgttcaaattaaaacaaccctataaacagcttatcagctgctctttaaaattagcacaaaaggatttgagtgatgttcgaaaagagttaagaaagcgtaaaattaaaatatacgaagcggaaagagacgaagcatttacgctttatatatgcaccattaacggctatgaagaaaaacaccgttatttcaacccgagaatacgggaacaggtcaccgccttattggaatattacctgtctcttgcgaccatttaaaaagcagccgggcctgcttttccttttcaaaaaataaaattcagactattcacactatacattcgacatgattttctttataatcgggacacgctgttttcaatgaaaaggaggaatgttatgaaactgattcatgttctcgccgccctgccctttttcggaattctcgccggcattccatttgccaaccgggtgacgccttatgttttcggaatgcctttcattctcgcatatgtcgtcatctgggcggtgctgacttccgttctgatggccgccgtttacaaattggacaaagaaaacaaggcgggtgagacggaatgaatgcagcatttcccgtaatggccgccgtgctcctgttttgtgtatatctcggaatccgggcccgaaaaggaaaacatatggaccttgaacaatggacggtgggcggacgcggcttcggcacgatgtttgtctttttattaatggcgggagaaatatacacgacctttacattcctcggcggaagcggatgggcttacggaaaaggaggccccgccttttatattatcgcgtacggctgccttgcctacattttgtcatattggcttctgccagccgtgtggacttacgccaaacaacacaaactgatgtcgcaatcagattttttcatttcaaaatacaacagcccgctcctcggcattctcgtatcgctcgtcggcatcgcatccctcatcccctatctcgtcctgcagctgaaagggctcggattaattgtttcagcaacgtcatacggacagattccgccctccgccgctgtctggatcggcgctgtctccatcacgatttatgtgatgatttcaggaatccacggttcagcgtggatatccgtcgtcaaagatatcatgattttaggcatcgtcctgtatttaggtatttatctgcccattcattattacggcgggtttacggagatgttcaaacaaattgacgccgcaaaacccggttttctcacgctgccggaaaccggacagagcgtttcctggttcagctcaacggttttgctgaccgccctcggcttttatatgtggcctcatacctttgccgcttcctattcggcggagcatccgcgggtgtttcggaaaaacgcgatcatcatgcctctttatcagctcgtcctgctgtttgtcatctttaccggatttgcggcgattctgcaggtgcccggtttaaaaggggcggacacggatctcgccttattaaagctgtctgtgaaaacctttgatccctggtttgtcgggctgatcggatcggcgggcatcctgacggcgcttgtacccggttcaatgatattaatggcctcaagcacgctgttcgccaaaaatgtgtacaaagccattctgcccggcacgactgacgaaaaagtctcacggctcgcaaaatacgccgtacccgttatcgcgctgatttccgtatattttacgctgaaaggcggaaataccatcgtcaccttgcttttaatgggctacagccttgtcacccagcttttccccgccctcttattcagcctgccgaagcggcgtttcatcacaagccacggcgcttttgccggcataacggccggggtcggaacagtggccttcattacgctgaccgaatcaaccgtcggaaccctctttccgtttcttccgcagatcattaaggatatgaatacaggcatcatcgcgctggttctgaacattgccgtcatgtttgccgtcagcgccgcagtcagaaaaaaacaaatcagcgcagccgaaaaggcggcttaatgataaaatagcggtaagacacatgaagggggaaagccgcatgatcatgacaacgaccgaaaccgtcgccggaaaacagattacggaagtaaaaggcttggtgacaagcagtatcgtccagtcccgtcacatcggaaaagatttgcttgcaggcttaaaatctgtcgtcggcggcgaattgaaaagctataccgaaatgctggaagactccaaaaaagcggtgaaagagcggctgatcagagaggcggagcagctcggagcgaacgccatcgtcggcctgcggttcgaactgaccgcaggacagaacacatccgaattaatcggatacggaaccgccgtcaccgccgaatccatttaaaaaaacaagcctctttagagaggcttgtttttttatttctcacatgcgatatagtctttatcccggtcaagtcttttatttgcattataaagcgcttttgatacatacggcttgtactttgttctgccgcccttgtttttcactttcgacgatttggccacgccgcccttatacaccttattcagcgccttacagttttgatacgtttttacctttgttttcgcttctgccgtctgccccgctccgtatgaacaaccgaacaccaggccgaaagacaaaagcacagctgccgtctttttcatttctatcctatcccctttcctgaatcatgttgtatgactgaacatatcatagttcaaataatctccatttacaagataaataggaaaatagttttaatttacgtccgcccgtatatcttttatggaatttttcccaaaaccttttataatatgaattgatagcgctatctgactatgatgataggaggagaaatgatgatgaaaaaagggcttgttgcgggtgttctcactacagccgttctattcggcgcatgtacggcggatattccgggggtgatcagtcccaatacggcggaagcggcgtcccagctcagtaaaggaatcggcggaagggcctatctgaacagcacgggctcagttctcgtcacgaaaattcagcttccaagctcgattcaggtgtcaaatgggacagcctatatttactcaggatttaccggaggcacagaggctgatatcgggcttcagtacagtgacacctatcatgtatggaaaccgatcatgaaagtcggttcaaagggacaaggccaggtccggtatctggaaggagaaagccaattcacttatacgaaaggcttccggcccggcagcaccgtacagctgaccatttacaaaaatctgaacggcaatacccgcgccacatattggggcacgaataatgacggatacaccggccgcatcatctcagaactcgcccaaaccaatgtaggctctgtctcaaaatggaaagcgctcgccaccgtcgcggtcacatcagaggatcagcgcccttacatcaaatcaaacttctcgacagcctttacgaacatcacgatcgacaataaagcagtcacacctgtgattgatacacaggattttgccaaattgacagtgtcaggcagcaccgtcagcatgtctgtcgtcaaataaagaattttgaacgcacgatttctttcatcgtgcgtttcgtaagggtctgccggatacgcaaatcccttatttttcggattacgtttaataaaaaaacagccctcctcagggttgtttttttaacatttctttcattatttccgccaaaacgctgagcagtccgccttatccttgatattaaattgaatcatgcgttcaagcagctcataatacaccggttcagtccattgaattctgaacaaacgggaagtagcgctgtagccggcacgggcaatgtcgtcggcaaaatgcgcaattccagcttcttcgggagaaacacttacatgatgctttgctgccgcaaagccgataataaaggtgccgtgatcggtaaacatcggcgtgttccacttgatctgcggtgttaaacccgggaattgctcagacgtccacgacaggatttcctccattcgcagacgatggtcagggctgtcgatacttgataaatagtctttgaaaacgtccatgtcttcctccttcaacatcacgtccgctaacgccaaaaccccggattttcagctttttctttgatgttaaattcgatgatcttcttaagcagatcatagtgcaccggatcagtccaccgaattctgaacaggcgtgaagaagcgctgtacccggcttgggcgatgtcatcggcaaaatgctccatcgtctctttttcaggtaaaatgctcaaatgattttttgccgcggcaaacataatgatataggtgccgtgatcggtaaatgtcggtttgttccacttgatctgcgcttctaagttcggaaattggtcagccgtccacgacaaaatttcctctgctttgagacggtgatccgggttatcgatttctgatacatattttgcaaacacatccatgcccatctctcctaaaatgaaatatcattactctttacatcatcatagccaacagacggacacgatacaactctatccgggcatgtaaatcgaaaaagcccttcccaaaaggaaagggcccgtccctttacatcacagctttctctaatatctctcccccagctcccgcaaaataaagtcgtagatcattcttgtccgctcttctttcggatacagcatgaattcctgccgcttcgggatatgactgcccatcctgtcctgaaaagtggttctgagataggcggttctgtaaacctgattttcaaaagaatgataggatacttccagttccatcgttttgccgtttgagaacgtgaccgctgtgtcatcaaatgccgtcggttgaaaatctttaacgtgcacatgagatatccagccgcattgaggccttgcagaagaaagtgtagggaataaaaagatgtgatttgaagggtccaccataatcggcggcttgtgagaaattttaatcgcttcatatgttcccgcttttctcccggcatagctggagccaaagtagcggcagcttctgtcgatgatgtgaatcggcttcatgctgacatacagaatgcagtctttttcaatgaccttcgaccccattttaccgtctatttcctcaggcaaaacagcgatggttgaacgatttacttcgtagctttctaagggtgcgtgtgttttctggcacatgatgtgcagcctccaatccttttcttgaaaatttatactaataatctatcatctgtaattggaaaacgacaggttttttttgaatatagctaaaaatcaccttttaaagctgtaatttagtcttaaattactatttaaatattatttttctttttcatttcacctcatttatacaatgatcattttcgttttttcgtcaatttgcaggatatgtcgatatatttccaagtattagttatctaaagattataaaaattaattgatttttccggccgttatccatatactataaaaaaggcattggggggattctttatgaaagagaaaaagtcgtacactgagctcatgaagtcccgcaacacggaaaaagcaaacgaattcgatgtgacaatggccgatatttacattcaaatggtgcttgatgaatccttgtataaacgccggatcgccatgctgacaatgcagattaataaggcgcttgatgataaaaataaagaagcgttcctcacgctttcaaaagaatatgccgctctcaaacagagtgaataagccaatccatatggattggctttttttacattatccgtttacgatggtgccgccgttcacatgaatcgtctgtcccgtgacataggaagaatcatcgcttgctaagtacaaatagctcggcgccacttcaacaggctctcccgggcgctgcatcggcacgtctgagccgaagacttccacttccttcgccgagaagctcgccgggatcagcggcgtccagatcggccccggcgccactgcgtttaccctgatgccctgagtgacaagagattgggaaagagatcttgtaaacgtgacgatcgccccttttgtcgctgaatagtcaatcaatgttttgtggcctttataggcggtaatggaggccgtattaatgattgaacttcctcttttcaggtgagggagcgcggctttcgtcaagtaaaacattgaaaaaatattcgtctgaaacgttctgatgagctggtggctcgtgattttctcaatccccggctgcacgtgctgctcacccgcgttgttgaccaggatgtcaatggaaggaaaggcttggcccgcctggcggatgacatcgttgcaaaaggcttcgtcgccgacatcccctgcgatcagcagacacttcgccccttctttttctacatattgcttcgtctcttcggcatcctgatgctcatcaaagtaaacgatgaccacattagcgccttcctttgcgaataaaacggatacggcgcggccgatcccgctgtctccgcccgtgatgatcgccgttttcccttcaagttttttcgccgctttcggtttgtcaaaaacggggcgcgggtccattacatattcaaagcccggctgccggttttgatgctgcggcggcaaggttttcttcttctgattcgccattttgatcactcctttacattaattactatattatgagtaatttgagcatcttatacgaatttcatgtatgaacagagtcttattggaaaaattaagaatatacaacagaggaggtaaatctgaattgactactttttcaaacgaggaaccggcttcctattggaaagcaacagctgacattccttcctttcccgccctcactgaagatacggaatgtgacgttgcggtgatcggcggaggaattacgggcctgacaacggcatacgaactgacgaaaagaggtttccgtgtcgctgtcattgaagcagaccggattttaaacgggacgaccgcgggcacgaccgcaaaaatcaccgcccagcatgatttcatctatgccgatcttattcagcagatcggcctgaccagcgcaaggctgtatttcgaagcccatctccgcgccatggaagacatgaagcagatcatcaaggacctttcgattgactgcagactgattgaacaagacgcatatctttacaccaatacagaatcaggcgtcaaaaaaatgcgcagtgagcaggaagcttataccaagctcggtattgaacacgagcttgtgaaagaacttcccgtccccgttgattgcaggctcggcctcgccatgaagaatcaggcgcaattccatccgcttttatatggtgcggcgctcgtcaaagagatcgttaaaaacggggcgcggatttttgaacagacggctgcgatcgacataaaaaaagaaccgcagccggaagtggtcacgaaaaacagacacggcatcaagtgcagctacattgtctgcgcttcccactttcctttttatgacggaggcgggctttatgccgccagaatgtatgccagcagatcctacgtactcgcggtaaaaccgaaacaagcgtatccggacgggatgtatctcagcatagacaagccgtccagatcactgcgatacaccgatttgaacggtgaaaaactggtgcttgtcggcggtgaaagccacaaaacaggccaaggaaaagaaatgtccgggcattacgaagcgctgaaacaatttgcggaagacacaatcggagttgaaagcatcccatatcattggtctgcacaagaccttgtcaccattgacaaaattccgttcatcggtccgatctcaggcgatgaagaacatattttggcggcgaccggttttaaaaaatggggcatgacaagctcagcgctcgccgcgaagcttttggctgatcatattcaaaacaaaaagaacccgttttccggcctgtttattccgtcacgcttccacgcagatcccggactgaaaaaactgatttcctataatgccgacgtggccaaacaccttatctcgggcaaacttgagaggccggacgcttcgcctgagagtcttgggcccggggagggaaaaatcgtaacggtaaacggcaaacgggccggcgcctataaagatgaaaaaggctgtctgcatcttgtcgatacgacatgcacccatttaggctgtgaggttgaatggaatgacggcgaacggacgtgggactgtccatgtcacgggtcccggttcacacccgacggcggggttgccgaaggtcccgccatcaagccgctgaaacgtctcacccaagattgactaaaccattctgtacgaatggttttatttttttccgcattaaaatatttttatcagattccttcattcaagttccttccaaaccgataaaaagaaaaagagaatatctgggggaactaatattgttatttaaaaaagaccgcaaaaaagaaacagcatatttttcagaagccgatggaaaaaaacgcatcgcgctttcaaatcaatatgcagatgtccaaaaacagctgaaaatggtcaggctcggaaacgaagaacttcatgtgcttgaagagctgcagccgttaattaaagaacatatctcaacaatcgtcgattccttttaccgaaacctggatcacgaaaaatcattaatgacgatcattaacgaccacagcacggtcgagcgcctgaaaaaaacattacggcgtcatatccatgagatgttcgccggcacaattgatgatgaattcattgaaaaaagacagcgcatcgcttccatccacttgcggatcggccttgaaccgaaatggtatatgggagcgtttcaggatctgcttctgtcgatgatgaacatatatgaagcaaccattccggatttgcatgagcttttaaaagcgatcaaagcgacgacgaaaatattgaatcttgaacagcagctcgtccttgaagcattccagactgaatataactgccagcgtgacgaacaagaggaaaagaaagcccgtcttcatcagaaaatccaggaaacatccggatcactcgctgatttgttttcagaaacgagcagagccgtgcaggagctggtcgataaatctgagggcatttccgaggcgtcaaaagccggcaccgtcacttccgtacatgtcgaagaaaaatcaatcggcgggaaaaaagagcttgaaagccagcagcagcagatgaataaaatcgacgccagccttctgcagattgaagaagaaatggacaagctgaatgacatcgcccagcagatcgaaaaaatcttcggcatcgtgacggggatcgccgagcaaacgaatctcctgtcactcaacgcttcaatagaatccgccagagccggagagcacggcaaagggttcgccgttgtcgcgacggaggtaaggaagctttcagaggatacgaaaaaaaccgtttccaccgtatcagagctcgtgaacaataccaatacacaaatcaacatcgtgtccaaacatattaaagatgtaaacggacttgtaagcgaaacgaaagaaaaaatgacgcagatcaaccgtctgtttgatgacatcgtccaaagcatgaaaacgagcaaagaccagacaggcaaaatcgacgttgatttgcaggcctttctcggcggccttcaagaagtcagccgcgccgtttcccacgttgcatcatccgttgattcacttgttatccttacagaagaataaagataaaccgaccggcctttttcataaagggccggtctttttaatgttaacttaaaatataatagagttgacatatataaagactcgctttattgtataaacatattttgataagctggaggaatacataatgaaattgacagaaatgatgcatattgccgtgtttaccgccattatgggacttttggggctgcttccgccgcttttcttatcctttacgccggttccgattacgctccagacgatcggtgtgctcttatcaggaagcatccttaaaccgaaagcggcatttttaagccaattgctttttttgctgattgtggcatgcggagcgcctctcctttcaggcggaagaggcgggttcggggtttttttcgggccgagcgccggatatctcatcgcatatccgctggcggcattactgctgagcctcagcatccaaggccttcgctcagctgctgtcccccatttgtttatcagacagttcttgttcggcgtgctgtttttgtatgtcatcggcattcccgttcaggcttttataatgcacattgatatcttgactgccgtaaagctcagcctcatctatgtgcccggagatctgcttaaagcggccgcagcctcattcgcagccgtaagaatcagaaaaactcttcaagcaagccggcttttgccgacgaaaggaagctgattttagtcatcatgattacatcatcatattcagatacagccggacaagcgccggaacggatcgcaattcagacagacacagaacagatcacctatcaaacttggaacaggctagtaaaccaaaccgcaaactggcttggcagcctttcagataagccggaaaacattgcaatattactgccgaacggcatcccatttttacaacttttcgcaggggcggcgcatgccggctgcacggcggttccgttagatccccgctcggctgcggcggaactcgcggaccagctgcacatcagcaaaaccgacctcgtcatctgtgaccgccggctgagcggcagactggacggcatcaaaacgcctgtcatcctgtgggatgaatgcgggcctttgatcgaggcggaaaaaacggaaggcacttttatcaaaaacaccggcctgcccttttataccggattcacctcgggatcgaccggtaagccgaaagccttcacccgctctcaccgttcgtggctggagagcttttcttgtacgaaacgtgaattcggcatttcccctgatgacaaagtgctggtaccgggcacgcttcgctcgtcacactttttatacggcgccgtcagcactttgtttatcggcggaaccgtcctccttcaaagaaaattcaatccggccggaatgaaagaccggctcagacaagctgacgttctatataccgttccgacaatgacggacgccctgctctcactagaggcgtttccggatacaccgctcaaggtgatttcttccggtgcagactggcccgcttcgtctaaacaagcgctgtcagagcgctatccccatttacggttgtacgatttttacggaacgtctgagctgagtttcgtggcgttcttatcgcctgaagacagcgcccggaagcctgacgcggcgggccgtccgtttgaaaatgttacaatcgaaatccgccggcccggcggggaacgctgcatgccgggcgaaacggggaagatttttgtgaacagcccgatgaaattttccggatacatcaacggcgcaaaacctgatgattccggctggatgacggttgatgacatgggatatatcgatcgtgaaggctatctttatatcgaaggacgtgaaaacgggatgatcgtatcaggcggcctgaatgtattcccggaagagatagaacgtgtgctcaaccgctgtccgggcgtcagaaaagcggccgtcatcggcattcctgatgattattggggcagcatcgccgttgcggtgatcgacggacatgcaaatgtaaaggaactgaagaaacagtgccgcgagcagctggcggcatataaaatcccgaaaaaatggctgttttcagaaataccggaaacagccggcggaaagatcgcccgtgccgccgtacaaaagcaggcaaaggacatgatggaatggaagctgtaattacggatgcgaagcggacgattttcgcccgggaaaacggcctgttaaaagactgtctccccgaagatttggcagctccgctgatccgacatttgagccggaacatgcccgaagacattgatgaagtcctgatcggaaacgcgacgggccgcggcgggaacctcgcccggctgtcagccttggccgccgggcttcctttgagcgtgtccggtacgaccatcgacaggcagtgcggttccggattggacgccgtgagggtcgcgtgccactttgttaaagccggcgcggggagcacatacatcgcgggaggagcggagagcagcagccgttcccctttctcatcccgggcgcgcttttctcctgaacacatcggcgatcctgatatgggcatagcggccgagtatacggcacaggcttacggcgtaacgagaaagatgcaggatgaatatgcccttctcagctatgaacggagcgtcaaagcgcacgaagacggcttgtaccgccgggaaattctcccctgtcacggattcgccgctgacgaaaacatgctgaaaaagcggaacatggggcctctcatcgcccgcgccaaacccgtctttcagtccggaggctctgtcaccgcggccaacagctgcggaatttctgacggggcggcggcagtttgtgtgatggaagaacaaaaagcgcggtctctcggtttaaagccgggattgcgttttatcggaagcgcggtaagcggcgtccatccgcattatccgtcagcagctccggtttatgccgtcaaaaagcttttgaaggaacgggacctgtcaccggatgatattgatatatacgaaatcaacgaggcgtttgccgtcaaaatatgcgttttttcacagcagcttcaagtgccgtattctaaaataaatgtccggggcggcgctctggccgtcgggcatccgtacggggcttccggagcggcgcttatcacccggcttttttatgaagcaaaaagacgcccggatgcccgctacgcagcagcagcgatcggcagcggaggcggagtcggactggcgcttctctttgaagtgttaacgtaacggcagtataatagatgatatcgataaaaaatgatcggagtggagactttatgactgccgtttgtttagtaagacatggagagactgattggaatgcccaaaagaagcttcaaggcaaatcggatattccgttaaatgcgacgggagagcgtcaggcgaaagaaacaggagagtacttaaaggggtccgaatgggatgtcatcgtctcgagcccgatgaaacgggccagaaaaacagctgacattattaacgggtttttgaatcttcccattgtcgtcatggaagatttcagagaacggagctacggtgatgcggaaggaatgtctttgccggaacggtcgaagcgctacccggataaaaactacccgaacatggagaccgcagaagagctgacagacagaatgcttgccggtttagtgaaagttcaggagcggtttcctgatcaaaaagtactgatcgtcgctcacggcgcagctattcacgccctcttgtccgctatttctgacggtgataccggcatacaaaacgcaaagcttgtcaatgcgtgcctgagcaatatcgaacgaattgaaaataagtggcgcgtcaaagattacaatgtaagcagccacctatcagaatcataacaaaaaggcccgaattagttttgggcctttttggcgagcatttttttctgaagatcatgtaatacggcgtccgcaccgtcaatgctccggcgctccgtccataccgccctgtccgcgcggtaaacgtgtccgttttttacggcagtcagctgtttccagaggtgatttttttcgagttcttcctcaccgtccaatagtacgatgtaatcaggatcgatatgcaaaagctgcccgggcctcattttgatagcgtctgatttcccgccggaatccgtctggaccgcatatgtaaaccctgcgagcgtcaaaagccgggatgtgaaaaaccggtcatcctttacggaaatgctgccatttgcagcgtcaattaataaaatcgtgccgccttctgcatccagctttcttttgatgtcattcagcttttcttcctgagccgacaattgtttctctatgatgccctctttaccgaccgccttttcaatggtaagggcagcatcaaccgcatcctgataatccgcagcttcatttttcaaagcgattgtcggagcgatctttgtcagctcatggtatatcccctgtgcaggcttgagtctgcaatgatgagatcgggttttaacgaagtgatttttttcaaatcgggatgtgacgggggcccgacggacggactgccgtcgtttcgctctttccggttatccgccgcggccgccggctttataccgagatcatggagggtgtcaataaagccctcattcaatacggcgatgcgctgcgggtgcgcagccacatgcgccgtccccagatcatgcctgacggcggtttcatgttcctgttctgagcatgccgttatgaagagaacggataagatcatcagcatactgaaaattggtttcatctgttccccctctttcgtttttccgcaattatatcattgacaatataagtatcaatgatattcattatcattatttttataaaatggtttcacagcttttctccctcaagaaagtcaaagactgattcatgccggccgctttatttcattccgctttcgtttccatcagacttctgcattcaacaaaaggtgacatttatcctgtttttgcctcagcttccaaaaatggaatcaaaccgttcgacccagtaaacaagagagcgattgcggctgtgtacaaatactcatgtccttccatcggttttttccattaaaatttaaatatttcgggttcctattaaacgaaagagagatgatatacctaaatagaaataaaacaaactgaaaaaaattgggtctactaaaatattattccatactatacaattaatccacagaataatctgtctattggttattctgcaaatgaaaaaaggagtggataaagagtgagaggcaaaaaggtatggatcagtttgctgtttgctttagcgttaatctttacgatggcgttcggcagcacgacttctgcccaggctgcagggaaatcaaacggggaaaagaaatatattgtcggatttaagcagacaatgagcacgatgagcgccgccaagaaaaaagatgtcatttctgaaaaaggcgggaaagtggaaaagcaattcaaatatgtagacgcagcttcagctacattaaatgaaaaagctgtaaaagagctgaaaaaagaccctagcgtcgcttacgttgaagaagatcacgttgcacaggcgtacgcgcagtccgtgccttacggcgtatcacagattaaagcccctgcactgcactctcaaggcttcaccggatcaaatgttaaagtagcggttatcgacagcggtatcgattcttctcatcctgatttaaaggtagcaggcggagccagcatggttccttctgaaacaaatcctttccaagataacaactctcacggaactcacgttgccggtacagttgcagctcttaataactcagtcggtgtattaggcgttgcgccaagcgcatctctttacgctgtaaaagttctcggcgctgacggttccggccagtacagctggatcattaacggaattgagtgggcgatcgcaaacaatatggacgttattaacatgagcctcggcggaccttctggttctgcagcgttaaaagcggcagttgacaaagccgttgcttccggcgtcgtagtggttgcggcagccggtaacgaaggcacttccggcggctcaagcacagtgggctaccctggtaaatacccttctgtcattgcggtaggcgctgttaacagcagcaaccaaagagcatctttctcaagcgtaggttctgagcttgatgtcatggcaccaggcgtctctatccaaagcacgcttcctggaaacaaatacggagcgtacaatggtacgtcaatggcatctccgcacgttgccggagcggctgctttgattctttctaagcacccgaactggacaaacactcaagtccgcagcagtttagaaaacaccactacaaaacttggtgatgctttctactatggaaaagggctgatcaacgtacaggcggcagctcagtaaaacataaaaaaccggcgtcggccatggccccgccggtttttttattatttttcttcctccgcatgttcaatccgctccatgatcgacgggtggctccctctgaaaattttgacgagaaacggcgggttgacccggctcagtcccgtatcggccaagtcctgaaacgtctcaatcgccgcttcccggtttccggtcagctcgatgccgtaacggtcggcggcgttttcctgataccgggagacggcgttcgtaatcggatcagaagcaaaactgagaacggatatgagcagcaataacagcgggagggcggccagatcttcaggcccctttatatgaagcattcggccgaagaatttggacagccgcttataaagcttgtcaatgatataaaacccggctaatgacagcagcagatacccggccagtccgatgtacacgtgcttcatcacatagtgccccatctcatgccccataatgaacaaaatttcccgatccttcagtttgttaagcgtcgtatcccacaaaacgatccgcttattcgaaccgatgcccgtcacatacgcattcagcgcattcgttttctccgacatatttacttcatacacatggctggccggaatgtcggccttgtcggcaagcgacaaaattttgctttccagctccttgtctttcagcggatagaaatcattgtataaaggatcaatcacgaccggctgcaggaaaaacaaaaacagggtaaacggcacagtaagacaccaagcgtaaaaccaccatttttttgtatgctttgtgatcagccagtaaaacacaagcacacacacggcaaacagcggaaaactgatccagaaatcaatgacatggtctcttatccagcttgctgctgtctgcgtcgaaatatgatacgcaagcgaaacccgatatccgatccactcaagcggaagcgaagccgccgtaacgatgagtgaaatcacaaatacgaagcttacgatttgcagcacccgaaagcgcaccgctgcttccagccaatgctttattttttttgcaagccccgtaatgagcagcagaaaaaataaaaaccaatctaacggcgctccgatgaaaaataaaaaatcctttacatttgaaaagttttcagcggctgccaggcggcccgggtccatgaacgaggacggatcggctttcgttccctttacggcctccgggacggcggagtctcctgtcataaagaaataccaatagaaaaaaaggccgtacagcacataggcaagtcccgctgccgctatccatttgcgcatggaagtctccctccttagccttatgacttactcctattgtaagcataaatgcaaataaatagaaccaagcctccgaaacggatgttaatcttttcacaacagaaaagaatggaacaacaggaagcgggaaagactaaaagacggagtgatgaatatgaaaaaaataatcgcgtttattgtagtaatcgcccttttggttattgctttcttctatgtatacagccggaccggcgatgtgtttccatcaagcaacgcagatctgattattctgtcagagaacggaaaaaaagaaatcaaaattaaagacaggcagaatgtaaaagatatgctcgatatcttgaaccaaggaaaacaagtcaaactgaccaaaagcgtgtctcccgattacgacggaacggtcaaataccatgaagaccgttttgattcattcagtatgtggctcgaaagcggcaattatatgatgtacaagcataaaaacacgtattacaaactgacccggcatgatacgaagcttgtgcaaagcatcattaaggaagaatcgcacagctgaccggatcagcatgtaaaagcgaagcccccggcttcgcttttcgtccgtcatttcggaagcatgtcccggaccgcccttctcagcagcttcccggtcgcgttcttcggaatctcatcaagaaaaaccacttccgccggccgcttatattttgccaaatgtgtttcacagtaatcgaaaaccgcctgctctgtcagctcaccgtccgcaggcactatataagcatgcaccgcttcccccgttttggcgtcaggaacgccgatgaccacggcttctttaatgccctcatggctgtagagcacttcttctacttcgcgcggatagacattgtatccgccgacgagaatcatatctttttttctgtcgacgatataaaaataaccgtcttcgtcgcgcttcgccaaatcacccgtgtacagccagccgtctttcagcgcgtgctccgtctcctcgggcatcttgtaatagcctttcatcacattcggccctttcacgatcaattctcccacttgatggtcgggcaattcgcgtccgagcgtatcgacgactttattttcgacatgtaaaatattcgtcccgatcgagccgggctttctcccccggtcaaacggattaaaacaagtaaccggagacgcttcagaaagtccgtatccctccagaatggtgacgtcaaaggtttgttcaaacgtctgcaacagagcgaccggcatggaggcccgcctgaaatgcacagtctgacggacgcaaaatcctccgccttgccgtgctcgtattgatacagatagttatacatcgtcggaacgccggcaaaaatggttgcctgacggcttttaatcagtttaaacacagaagccgggctgaattgcggctcgattaagacacacgctccgctcatcagaggcgcattcatacaaacggttaaacaaaaaacgtgaaacatcggcaatgccgccacaattttgtctttctcattcattcctaagtatccggcgacatcatttgcattggagaaaagattctgatgggtgagcatggcgcctttcggttttccggtcgtccctgaggtgtataaaatgacggcagtatcgtctttggacaatgtcggataagttctgctgcgctccgccgggcggagcatttttgtaaacgttgtcatttttaagcgcaattgagggtcttctgtcgatggagcgttctctgctgtctggctgataatgatatgctccagcagcggcagcgagccgtgcaggctttcaaatacgggaattaataggtcgatgccggcgatcgctttgacatcgccgtttttcagcatgtatgcgatttctgaaggtgtgtatgccggattaacaggtatgacgacaattcccgcttttaacgcgccgaaaaacgcaataacaaaatcaggcgtatttccgagcagcagcgcgagatgatccccttttttcagtcccctgtcctccaagccgtttgcaaatgctttgattttacctgccagctcctcatacgtcatgtactgatcttgaaacagacaagctggtttttccggtttctgcgatgccgtttcttccaatttggaaaccagattcattttcccaccctttaaaaatataatgaatgaatagtcattcatttatccggaataaacgttcacttttattatagaaaaatatagaaaaacactcaagggcaaaaagccccgagtgccgtaaaaccggaaactataattgtttcagcgcttcactgaccggcgtgccgcccgctgtcagatcgaacgctttttcatacgtattcggttcatcaagggatgcgataacggtcttggcgacatcgtctcttgaaatggagcctctttctaaatcggctgcggctttgatatttcccgtgccgggatcatttaataacccgcccggccggataatcgtatacgtcagaccgctcgcttcaagaattttatccgcataatgctttgcggcataatacggcttcagcgcttcattccaattgtcgcggttatgagcctgaagggcgcttaccataatgaaccgcttgatgccggccttctttgccgcttctatcgctttcgccgctccgtcaagatcaatcagaagcgtcttatcgtatccggtgcttcctcctgatccggcggtaaacacaatcgcgtcacagccttcagcggctttcgcgatgtcttccgtgcttccttccaaatctgcaagaacggcttctgttcccgcggcttgaagcgcttctttctgctcttctttccggaccatcgcccgcagcgtatgcgtgccgtctttttgaaacagcccggtcagacgctgtccgatctgcccgtttgctccgatgagaaatactttcatcatgatccctccccattcattatggttctatcatttcacaaaaacgggcgcagattcaaatcatgcgttcggcaaatgttctaataaatcagctcgaggaaatcttccagctctattttgccgaaatactgtttcagatcgattccggccagcgcctccctgatagcggttctgtcatactgttttccggtcagcgcctgttcgacttcactcacatctttcgcaccgaagaaatcaccgaaaattttgcagtcctgaatgattccttttttcacttcaagacgcagatcaatcgatccgaccggataacgtttcgaatgctgaaggttgaatgcgggcgaccttccgaaattccagtcccagttttgatagcgctcttcggaaatcttccggatcgctttccagtcttcatcggtcagtttatattccggcacttcggaaagatcatttgtattaaaaatatggtgaagcagatgttttttgaattcgtccgccgtcattttgtcatcaagaaactcgctgatgttggcgacacggcttctgattgacttaatgccttttgattcaattttgtcttttttcacttttaaggctgacacgacatgatcaatggcggaatccagcattaatgttccgtggctgaaaatacgccctttcgtcgaaaattgagcgttgccggaaatttttctgccgtccgcgacgatgtcgtttcggccgcttaattcagcttccacaccgagctggcgcagcgcctgaataacgggttcggtgaattttttaaaattgtggaagctgtcgccgtcatccttggtgataaaactgaaattcagattcccgaggtcatggtaaaccgcgccgcctcctgacagcctgcggacgacgatgattccgttatcttctacgtatttcgtattgatttcttctattgtgttttggttcttcccgatgataatcgacggctgattgacataaaacagcaggtatgtctgttcagggtcgagatgcttcacgcaatattcctcgattgcgaggttgatcctcgggtcggttatgttttggttgtcgataaataacatggtgctcctcctttatttctcccacttcaatccggaagcggcgattgtcacttcgcccccgaacacggattccgcttcttctttcagcttccggtgctcgccgaaatgaggcagatgtgtgagaatcagctcccccgctccggcctcctccgcgatacgtccggcttccaaactgttcatatggccggctgacgtgccgtcctggtccgcgtaaaaattgcactcgcagatcagcagatcggcattttccgcaaacgggataaacgcgtcctggtagcttgaatcagccgtatacacaacagaagctgaaccgtcagtaatccgcatcgcataacaagtgaccggatgcaccgttttcaggaaggtaatggtgaacggcccggcagaaagcgggcggtccggctgataggccactcctttcgtatgcgttttatatgtaagacgctcaaactgttctatatcagcatcatgcccgtaaatcggcagtgcatgcgtcccttttccgagaaaggagccgacctgtttggcaaattgaagcggcccgatatcagcgatgtgatcatggtgataatgggacaaaatgacggcatcaagctcttctgccggaacataggcaaacagctttgataatacggcgcttccgcaatcgacgagcagagaatagccgccggactgaaacagatagcctgaagttgcttcgtttgcggccggaaacccgccgcagcatccaataactgtaactttcatatgaccctccgaatgtttatgataaaaagatcctttcctccaatatacctatttttcgtacaaattgcatgttttaaacattgtgccaaaacagccgttgattttccaaaactgttataatacaatgtagagacaaaacaatgaaagagggatgggtatgttggaaaagatgtcggattttttcagaaatttacccggtaagaaatgcgaagaatgcggaaatgagattgttgagcagtatgagtgtcacattaatctgtgcaatgactgcttgaaaattaaggatatgtgacaatagggcgccgcacaattctaagttgtgcggcgcccgttttttcggccgtcatcatactttctgaatagggcgttattcaccattattagcaattatctgtacgttttaaaagattcagtattttcaatctatatttttctatagacggattgttttcttttctattataatttgttctaatagctatctttttagatacttattgcacttttttcttcgggaggtaatctatgaaaaaattacgctttggactagcgacgcaaattttcgtcggactcatactaggggttgtagtcggtgtcatctggtacggcaatcccgccattccaacatatttacagcctatcggcgatttgtttttacgcttaatcaaaatgatagtgattccaattgtcgtctccagcttaatcatcggcgttgccggcgcgggaagcggaaaacaagtcggaaaattaggcttcaaaacgattttgtattttgagatcattaccacttttgccattattctcgggctggctttggcgaatctgtttcatccgggaacaggcgttaatatacatgaagctcaaaagacagatatcagtcaatatgttgaaacagaaaaagaacaaaataacaaatctatcgcagacacattcctgcatatcgtaccgacaaacttcttccaatcattagccgaaggagatctgcttgccatcatctgctttaccgtgctgtttgcactcggcatctcggcaatcggtgaaaaaggaaagcctgtcttggccttctttgaaggtgtttctcatgcgatgttccatgttgtgaacctcgtcatgaaagttgcgccgtttggtgtttttgcgttgattggtgttaccgtttccaaatttgggctcagttccctgctttcactcggtaaactggtcggtttagtgtatgtagctttggctttctttctcattgttgtattcggaatcgtcggaaagcttgccggagtaaacattttcaaattcctcgcctatatgaaggatgaaattttattagcgttcagtacgtcaagctccgaaaccgtactcccccgcgttatggaaaaaatggagaagatcggctgtccgaaaggtattgtttcctttgttgtgccgatcggatatacctttaacttagacggatctgtgctgtaccaatctatcgccgctttattcctcgctcaggtataccacattgacttgtccatttggcagcagattacccttgtgcttgtcttgatggtcacttccaaaggaatggctgccgtgcccgggacttctttcgtcgtcctgcttgcgacattaggcgcattcaacattcctgcagaaggccttgcattcatcgccggtgttgaccggattatggacatggcccgcacggtcgtcaatctgaccggaaacgcgctggcatccgttgtgatgtcaaaatgggaaggccagtatgatcccgttaaaggcgcgaaggtcatgagcctcgccaaaacagaacaaaacacaaccatttcaggttaaaatgaaaaccctgcacggaatgatttccgcgcagggttttttatgccatcggcgatagaacgtaccggtgcaaaagcttcgccgtattaagaagcgataattcatgcgtgcgttcaaaagcgtgtgaagcgtcaattcccgggccgatcagcccgtgaacgatgtcatggcccgaacggatggctgctgaggcatcagaaccgtaatacggataaatatcaagctgataatcaatgccatagcgctccgcaagcccggccagatgttttctgagctgataatggtacggtccgctcgcatccttcacgcaaatggagacggtatattcatccgtagactggccgtcgccgatcgctcccatatcaacagccaagtattcgacggtctcaggaggaatgttggaattgccgccgtagccgatttcttcattattagaaatcagaaaatgcgtcgtatacggaagttcgattttctcttccgtgatgcggcggattaaattcaagagcagagccacgctcgctttgtcatcaagatgccgggacttaataaagccgctcggcgtaatctgcacgcgcgggtcaaatgagatgaaatcgccgaccctgatgccgagatcggacgtctcttccttcgtccggacaggctcatcaaggcggacttccatattctcctgattccgctctgccttgccggcgtccttgtagacgtgcactgaagtctgatgcattaagatggtgcctgtataggttttgccggaagaagtttggatctcgcaatattccccttcaatcgagtgatatcggaagccgccgatcaagtcaatcttcagccggccgtccgactttatttcctttaccatcgcgccgagcgtatcgacatgcgccgtcagcaatctgtgtttcttgtcatcacggccgggaattgtgacaaaaagaccgcctttgcggtttctgtaagaggagacgccccattcttttaaaagactttctgtataggcgacaacctcgtatgtattgcccgtcggactcggaatcgacaccagttctttaatcagttccatcgtatgtttcatattttccacaggtcattcctcctatcaattttattcttcttaaaatatactcttttgatccataacccgtccaatcttttcctgctcttttttcatagaatgaagggagcatgagcataggagggaaatgtatgatcagccgtaaaccgcacaagcggaaaaggtttcataatgattggtttgaggattggtttgaggatgattggtctggtgcagccttctggtgctgtaaaaaagaaaaagatcactgtaaaaagaaaaaagaagacccttgtaaaaagaagaaagacaaaaagaagaaagacaaaaagaagcatcatcattcatgccgccgctgctgccgtcattggtaatcgttcacacaagcccgttttacaaataaaattctcatgctccccaaacagcggatgctgcttgggtttttttattaaaattagtaccaagtaataatatcaggtgttataatctgatataaaggagtgattttttcatgtcaaaatctaaaattacagcaatcggtacatatgctccggcacgccgattaacaaacgcggatttagagcgcatcgtcgatacatctgatgaatggatcgtccagcgcaccggtatgaaggaaagacgcattgccggcgaacatgaattcacatcggatttgtgtgtggaagcggtgaaaaaccttgcagaacgatacagcggaactcttgatgatgtcgatatgattcttgtcgccacaacgacggcggactatgcgtttccaagcaccgcggcacgcgtgcaggcttacttcggctggccgcacacgggagcgcttgatattaacgccacatgcgccggactcacttacggccttcagctcgcagacgcattaattaccgccggttcccatcaaaaagtgattgtcattgccggtgaaacattatcaaaggtaacggattatactgaccggacgacctgcgttcttttcggagatgctgcaggcgccctattggtggaacgcgacgaatcagcgccgggctttttggcagccgtgcaaggaacagcgggaggaagcgcggacgtgctgtatcgcacgggactgagcgcagaattaaacggcgagccgcttaaaggcggaggaaatatggtgcaaaacgggcgcgaagtatataaatgggcggccagaaccgtgcctgaggaatgcaatgcccttttagaaaaagccggcttttcaaaagacgatctggattggttcgttcctcacagcgccaacatgcggatgatcgaatccatctgtgaaaaactgcccttcccgcttgaacggacattgacaagcgttgaatattacggcaacacttcatcggtttctattattctcgctttggatgaagctgtgaaagcaaaaaaactgtcggaaggccagacgctggtattgttcggattcggcggcggattgacgtataccggacttttggtgagatggggattttaatcgaaatcaaaaaaaagaggccctgagcatctgctcagcgcctctttttcttatgctgttatttcttcttccgttttgtgttcttttttgctttgcaccgtaaaatacacgatggtcagcgcgatcatgacaacggcgatgcccaacagaatggatgcctgctgccacatatagccgtaatcgccatttgaaatgacggcacggaacccgttgatgctgtaagtcatcggcagtgccccgtgaatcacttgatagaatcccggcaggagttcaagcgggaaggttcctccgcttgccccaagctggagcaccagaatgatgacagcgataaagcgtcccggatttcccatcgttgtcgccaataattgaatcatcgacaggaacgcgatgctggtaatcatcgtaaagagatagaatctccaagtgctttccacatcaagcccgattccttttaacagaaccgtggcgactataacggattgaatcagtccgacgagcagaatgacgctgaatttgctgaggaaccattcaaaaccgtttctcggacgccctgaagcttcactcagagggaatacgaccgtcagcatcaatccgccgacatacaagcccatagagagaatataaggcgtcagtccggtaccgtagttaggcacggaatgaatcgcgttatcgtccgtttttaccggatcggcaaacatgctgtacgttttgtcatctgtcttaatgtccccggtttgatcagccgcatctttcagctggctggacaattgtccggtgccgtctaaaagcttgcttaaaccggtgccgagagacgcttgaccctgctcaattttggacgagccgtcatggattttgttttgcgcgtccagcagtttcgttaagccgccagacacctggccgctccctgacactaacgcttctgatcctgatttgagctgtccgaacttgctgttgtattcgccgataccggccgtcaatttgttttggctttcaaagacggtctgcgctccgctgtacaatttatcagttccagccgtcagctggttaatcgcgtcttgtaccgccgccgcgccgttatacagtttcgatgtggactgaggcagtgctttcagctgatcagccttcgcttttacatctgccagcgcgctttttatgactgacatatccggaagctggatatctccgccggacggaagctggctgacgatattgtctaaatccggaaggtcggccttcggaagcttctcattcagaagctgaacaagtttcgctttttgctcatccgttaagaaatcactgtccttaatcacctttttgaccgcgtcatcccgggcatccaggctgtttttcagatcagaaagctttttcttaaactgctgcaattccttttcagtctgctcaagctccccaaccgctttttcaatatctgagaggttgactgaattgatcgcatcttcaaatgccgccgctttttgcgacacttcctgcgccttgctgtttaacgcgcttaatccattcgttaaatccggaagcttttgctggagctgcttttgtgcgtcaaggctcgttttcagcccgctggccacttggcctcctcctgaagcaatctgccctgatttatcttgaatttcggcgcttgcgctctgaagttttgcgatagagctgtcaagcgtttgaattccgcttgtcactttcgccgctccgtctgcaagctgctgcgttttatcgccgatggtggcggtgctttcagtaagcttcgctaaattttccttcagcttggcgctgccgtctttcgcgtttttcgtgccgtcgtctattttcttggcgccgctgctggctttgccgagtcctttggcaatatctttaaaattgtcaaaaatgacttttgcgtattgctccgtcacttctttcgacacggaggctttcagcttgtcgatcgccttttcgccgattgtcgcgccgacatagtttgatccggcattcgtatgatatttcagatccagcttcttcggatttttatccattaccgtgctggcgtttttagaaaaatcttcaggaatctcgaccaataaataatatttagcatttaataagtcctttaacgattgatcaagatcgtttgaaaaatgccaatcaaaattatcatttttctttaactctttcacaagatcgtcaccgatctgaagatgtttcccttcgtagtccgcccctttatcctggttgacaacgacaaccggcagctgatccaccgtgccgtacgggtcccagtacgccttcaaaaacactccgctgtagatcagcggaacgaataatatggcaatgatggggattaacagtttcttgttcgttacaatgtctttccactggctttttattgtattcaaccctgttgcctccttccgcaaactgactcatttgacaaaacggtcacggcacctaaaaagtgaaggatcatctattatttagataatccttgaccaacatacatttccagcaattcggcgatcgtctctttttcaagaggcggatggtttttttcccagtcaaatatcagcgcgatgtagagcttgagcatcacaaaagcggtcagttccggatcacacggtttaatgcttccgttttcaatggctgtttctatcttttctttaatgtatgacagaatggcccgctccattttcgcaatgacatcctgaacggctattgtaccaatctcggcgttctcctgaaaaattttaatagtcagctggtgtgtttttctgaattccaaaatcgcgacaagcgcccggtgaacattttcgtgaaatgaaagctccggtttcatcgcttcgtctgcgtgttccttcatttctcttaaaatagtggtgaaaatatcatcaaacagttcttctttgtttttgaaaaacgtgtagatggttcccttccccacatttgcaagctttgccaccagatccattgtcgttgctttgtagccgaattgtgtaaaagacttcgttgccgcttccagaatgagctttttccgatcgacggacatgtttcccacctcgttaaattgaccgtttgaacgttttagtcattttgtacataagataacttatcacagtcgcaaagaagattcaaatgttttttctctttattggtgttccctttacagaacgggaacatgcaaaaaacctccgttttacgataacggaggctggtacgtttcaaataaataagcgagtgaatcatatacggcggcttttccctggtcgatacagtcggggatgcccaccccttcgaaagacgcgcccgtcgcgtatacgcccggataggaagctttcagcgcatctctgaactctttgatgcgctccttatggccgacatggtattgcggcatgctttcgttccagcgggtcacacaggtcatttccggttcgccatttattttcattacttttttcaaatcttccattacgattttaatgatctcgttatctgaaagatctacgatggattcatctccggcctttccgacgtacgccctgagaagtgttttgccctccggcgccgcgtgcggccattttttattcgtccatgtgcaggccgtgatggagaaatcgctgtttcttgagataacgaatcccgtaccttcatgctccattttgacggctccctcaggaaaacctaaggcgacgttggcaacggacgtagaatgcatatctttgagacatgaaaccgccggcagatcagaaagcattttcgccgcggctttatgcggggctgtcactatgcatccttccgcatagagcactttgccattatcaagcgtcacggaatatcctttctcctcgcggccgatatgggtgactttcgttcctttcatcacctttgtcagcgtaagctgcttttccagctcctccaccaacgtttgaagtcctgtcgtcaccgttaaaaactggccctgctttttggccgtcagctgctgtcccgaaggctgcggacgtgattttttcataccgagaatcaggcttctgtgcttttgctcagtctgatagaattgcggaaacgtggacatgaggctcagcttatcaatatctccggcataaatccctgataatagcggttctattaaattctcaacgacttcgtcaccgacgcgtctgcggaaaaattcacccagagactgatcttccttcggtttgctcgcaggcaggacaaagtcaagcgccgcccgcgcttttccgggtacagaaaataaaccggtggagatgaacggagcgattttggtcggaatgcccatcaccgcgcccttcggcatcggatgaagcgtctcattgacgagcacgtaagactggccggtcgcattgttgacgagcagatgctcaagccccaaatccttaacgagctgcggcgcgctttttttcctttctaaaaaagaatccggcccccgctcaatgatgtagccgtctttatgcgccgtctgaattttgccgcccgctctcgggcccgcttcgatcagggtgacctcaagcggcagctgtttttccttgatttctttttccatgtagaaggcggcggctagtcccgttatgccgccgccgatgatgaccagatgttttttatcgccactcatttttatcgccttctttaccgtttaattctacttgtccagctctttcagcacgaccgctgcaagcgcgtcgataaattcaggctgtgcgttcggcatggccggacgatagtagcttgcgccgacttcttcggtcacagctttgcattcataatcattatcgtaaagcacctctaaatgatcggcaacgaagcctgcgggcacgtatacaaatgctttataaggatgcttttgatacagctcgcgcgtgagatcctgcacatccggcccgagccacggatcaggggtgttcccttcgctttgccagccgactgcgtaatcggtaattccggcgccttcggcaatcagttttgcggattcctccagctggtcaggatacggatcgccgtattctttaattttttcaggaaggctgtgcgctgagacgatcagcatcgcgtcatcccgttcttctttcggcattgattcatacgttttcttcacctggccgacccaataatcaacgaatttcggttcatcataccagctttcaacagacttgatggtcaagccgccgagcttctccgcttcttctttcgcgcgtttgttgtatgactggacgctgaatgttgaaaaatgaggggcgagcacaaggctgacagcttctgtaaggccgtctttatgcatgtccgccaccgcgtcttcaataaacggttcaatatgttttaatccgatgtacactttgaatgttacgtcgtcctggatttcatttaaacgctgtgcgagcttctccgcctgctcctgcgtgatttttgccagcggagaaatgcctccgatcgcttcatatctgtcttttaagtcttgaagcatgtgcggctccggctttcttccgcgtctgatatgtgtataataacgttctatgtcttcttctttgtaaggcgttccgtaagccatgacgagaagtcccattttctttttgctgctcattttgttaaacacctcttttgatggtctgtctaccttgattttgacaggaaaatcttcttataaccaacgatctgctcaggaagattgttccgtttttttggccgcggaatattcatgtacaaacgccgtcagctttttcagcgttgccggattgacatcagggaatacgccgtgccctaaattgaaaataaacccgtccgttttcatgccttgatcaagtatcgctttcgcttttttctcgatgacttcccaaggcgcaagaagaagcgacggatcaagattgccctgaaccgtttttgtaatgccttgttttctggcgtcatctatgccgagtctccaatcaagaccgacgacatcaagaggaaggtcatgccaatccccggccaggtggcttgcgcctacgccgaacatgatcagcggaacttgctctgctgaaagctcccggaatattctgtccatcaccggttttataaactgccggtaatcttcgcggttcagcgcgccgacccatgaatcaaaaatctgaatggcttttgcgccggcattaatctgcgcttttacataaacgataatcatgtccgcgagcttgtccatcagcatttgccacgcttgcggcatactgtgcataaacgcttttgttttgttgtaatttttagaaggcccgccttcaatcatataactggccagcgtaaaaggcgctcccgaaaaaccgatgagcggaacattcagctgttcgtttacgagtaatcggatcgtttccagcacgtaaggaacatcctgttcgggattcagttcgccgagcttttcaatatccgcagcagagcgcaccggctgatcgatcaccgggccgattccgttttttatttcaacatccactccgatataaggaagaggcgtcataatatctttatataaaatggcagcgtccactccgtactgctcgaccgggagcctcgtcacatacgcgcacagctcgggctgatgcgtaatttcgactaagccgtacttttctttcagcttgcggtattccggctgagacctccccgcctgtctcatgtaccagacagggacgtgatttgttttttctccccgtgccgcttttaaaaacgtatcattaaacgcttctcgtttactcatctgaatttccacctttcctcctgcaaccatacgttcgtgttcttcgcccattacactataccttgttttttctgaatggtatagaattgaggcttaatgttcaaaaaatcgccgaattcatgattaagaagaaaaaagcttcggctgaacgtattccgttccctctccttcttgattcgtctgcgaattaaatggaacgactttgtatgaagcccctgaaaacagattggcgtacggtatgtcaaagctgccttttcctttcaccgaatccagaagcttgtcttttccgtctttcttctcatatattcggtaaacaacccgatcatccttttgaatatcccattttaattgaaccgtaatcagtcccatcgccttaaatgtataacgggccgacagggattttaccgcctccagctcaatcgggctgcccagttccttcacattttcaggctttttgaatgtccggccgttttcccccgcttttgtgacgatatctttaaagagtctgaccgggtattggctgccgcctttcagataatgggttttatccgttttgtcatagcccatccagacggctcctgtcagtccgggagtgtatcccgcaaaccaggcgtcctttgtcgcgccggggatgccggtaaatgtggtcgtgccggttttccccgccaggtcaccttgatagctgccttgtgaagcggttccttcttttacgacctgctgaagcattctcgtcatattccatgccgtctgtccgctgaagacgcgcgttttgccgtttttaggcccggataacgtttctccgtcttcgtccgtgatgttctctataaaaaatggcttcgtatacattccgtttgccgcaaaggtatgataagctccggcaagctgaagcggagtgacgccttcagacagaccgcccagcgcaatcgcgagtccgttgtcagaaatgttcatgccgtttttctcaagatacgattttcccatatccacgccgatctgcttcaatgtccagacagcgggcgcatttatgctgtaagtgatcgcatcctgcatcgtcacttcccccttgtactgtccgtcataatttttcggttcatacccgtcgtaggacgtcagtttgtcttggagaagcgaatacggtttgaacttgtcttcctgcatggcgggcccgtatacggcaatcggcttaaacgttgagcccggctgccgcttcgccgtaaccctgttgtatccttttgtcacgtagtcgcgcccgccgaccgccgcgcgcacgcctccggttttattatcaataaagacggcgcttccctctgccgcctgatccgtccccggaaaatagccgctttccttcatgagggtatatgccgttttctgcagcttggaatcaagtgacgtccggatcgtataaccgccttgaagcagctgttctcctgacatcgaataacggtcttccgcctccttgatgacaagatcgatataactgtcaaaccaaggcgtttctgatgttttcttgacattaagccccaatgtccggccctgggctctgacggcttccttggcgctgatatagccttgatcgttcatcattgcaagaatcgtatcgcgccgttctttatttttatccggatgctgaatcggcgaataaagagatggcgccttcggaatcgctgccagaacggctccttctgcaacggttaaatcttttacttctttattaaagtagtagtgggacgcggcttgaatgccgtaaacgccatggccgaaataaagctggttcaggtacatttcaagcagcttgtccttgctgtaatcacgctcaagattgatggcgataatgacttccttcgtcttgcgcaaaaatgttttatcatgagtcagaaaaatgtttttcgccagctgctgggtgatcgtgcttccgccctccaccttgccgcctgctaaaacatcccggaacaccgcccgtccgacagacttcacatcaatgccgtgatgttcgtaaaaccgtttatcttcaacggcgataaaggcatctctcacatcttccggaacctgctgaatggataccggctcacgattttccgtatagaggctcgcgatttcatcaccgttttgatcgacgatttttgaagatgcgtgcagtattaatttcttttcatcgatgacataatggccgagaaatataatgataatgtatccgattaacgcgagaaaagcggttgccgccgcaattacagccggaataaagaatctttttttctttttcagcataagtcacctcgcctttcttaacttgtagtatgggaaatattgtttcgaattatgtcagaatgagtcgccaatagaaacttataccactcttttgatatactagcaagcaggaggtggctgatatgaaggtttatattacatacgggacagccgattttttaaagacgattgccaagaaacacccgagtgagaatatggtgctgatgcaaggggaggataatgcggttttaattcatgaaacaaatggagaaaccgtttttcaggcgccccattcctatgaaagcatcgacagcgtcggggaaatcaaaaatccgggctacgccgtcctcaacaacatcgccgttacccaggaaggccgtccgctgtttgaaaaccggtttaaaaaccgcgccggcaaagtggaaaatgaacccggttttaaagccatccgcgtattaagaccgctcgaaggcgatacgtatgtcattttgaccctgtgggaagaggaaaaagcctttcaggattggcagcagtcaaactcttatcaggaagctcataaaaaacgcggaacatctgccggtatcgacacgacgtctattttttcccgtccgtcttatgtaaccgcttattacgcaatagactgaaaaccgccggagattctccggcttttttgatgtcccgattttacgcatccttctttgcaccttccgcccgcctatgaataccctgtagcaatcctatttataaacggagtggttcaattggggatcggcgtctactcggtacatctgctttatgttgcttttatcgcggccattatcgtttttatgcttctcagaaaagatacaacctttatttcactcgccggcatttttgtgattgcgctatggacgacgcattcattctccgcttcggtcagcagcctgtttcacagctttacgtatgccgccggagaattgctgccgacgatttttatcatttgttttatcgtggcgatgagcggccttttgaccaaaaccggtattaatgaagcgatgatttctccgtttgcaaagctgatgaaagggccggctgtcgcgtattgggttatcggctgtctgatgtttgccatctctctttttttctggccgtcacccggggtggcgctgatcggcgctgtgctgcttcccgcagcgatccgggcgggcctttctccgatcgctgcggctatggcgatgaacctgttcggccacggattcgctttatcgggggattacgtcattcaggcggccccgaaattaacggccgatgccgcgggcatcccagtgagcgatgtcatgcaggcaagtattccgctcgttttgatcatggggttaacgacgacaatcaccgctttcttcctcatcatgcgggatcgaaaaaaaacgaaggccccctctccttggacagctccggttctttggacacaagtatgtatctgccgaaaaaactcagggtgatcctggcggttttcattccgcttgtttttctcgccgatattatctgcatgatcgtataccgcctccaaggaaacgatgcgacggcactcgtcggaggaaccgcgatcggcattctcctgatcattcatttcattgtatataaagagcggcatttagaaaagatcaccgagtattttatcggcggttttcaattcggctttaaagtattcggccccgtcattccgatcgcggccttcttttatctcggtgacgcggggtttaaaaatattttgaacaccccgctgccgaaagggtctgcgggaatcgtcaatgacctcggactggccctgtcccattcttttccgatgtccggagaattcgccggcatcgccctggccgcagtcggtgcgattaccgggctcgacgggtcagggttttccggtatatctcttgcaggctcgatggcaaagctgttttctgccgcgcttcatacggacccggccgttttaacggcgctgggccagatttcagcgatctgggtcgggggcggaacattggtcccttgggcactgattcccgctgcggctatttgtaaagttgacccgtttgagcttgccaggaaaaactttatccctgttgcggccggacttatcgtcacgaccatcgccgccatcatcattctcccgtagcaaaaagattgaaatcttctgacattttctatacaatcatgggaaaagcagacgagggggcatcgcttttgacgttaacgacacttcaaaaaagcttaaacgctcagcttgacgggctgtatgaggaaatggttgaaatcaggcgtcaccttcacatgaatcccgagccatcctttaaggagaaaaaaacaccggcgttcatcgcctcattttatgaaaagctcggcgtccccatccggacgaatgtcgggggcaacggtgtcacagcctgtattgaaggcggtgaaccgggaccggtcgtggcactcagagctgattttgacgctttgccgatacaggatgaaaaagatgtgccctatgcttcacaaattcccggcgtcatgcacgcctgcgggcatgacggccatacggcggctctgctcgcggccggaaaagtgctgtaccgcaaccgggaaaaactgaaagggtcatttgtgatgatccaccagcacgctgaggaattatctcccggcggagcaaaagcaatgattgaggacggctgcctcgaacatgtcgatgccattttcggcacacacctatgggcgactgaacccgtcggaacggtcttatgccgcccgggcccagtaatggccgccgctgacggctttacgattaaagtcatcggcaaaggcggtcacggtgcgatccctcacgatacgaaggacgccgttttaatcggctcacaaatcgtcacggctcttcagcatatcgtcagccggcgggtaaatccggtgcagccggccgtcatctcagcaggctcgttcaccgctgaaaatccgtttaatgcgattgccgatcaggcagtcatttcaggcaccgtccgctcgtttgacgaaagtgtgcgcggcctgctcgaagcagaaatagaagccgtcgtaaaaggaatctgttccatgcactccgcttcctatgaatatcgtttcaaacgcggctatcccgccgtcgtcaatcatcctgaggaagcggcgcacgcggcggcagccgcagcggaaacagacggcgttacgaaagtcgttgaaggagagccgcagatggcgggagaggatttttcctattatctgcagcatacaaaaggcgcttttttctttacgggcgccgctttagaaaatgcggaaaccgtttatcctcatcaccacccgaaatttgattttaatgaaaaagcgatgctgacggccgccaaggtgcttatcggcgccgcggtaagctacccccgctgacataaaaaaaacagccggtacattacgtaccggctgttgtaattcttaaatgaaaaacgtgccttgccgtctcaccgagctgtgacagcagtttataattggccgctccgcccacggcggctccgacgaccggcaaaagctgaaacaatttgaccacgtccagataatcgcggtattcctgctgaaaaactctccaatcgacatcatgctttttcgaatcccactgttcaatcattgagtatatgcgtttccgctgttcaccgcttgagaaagccagctgaaaaataaacagcaaaaacaatcgctcatccctgtctttcacatcatagccgtaaatggaggcaagatcgaacagacatttcattttaatggatagcagcaaaggaaaatcagccattcctaaaaaaattccgccggcccccgtaccgataccttcagctgccgcgaccttttggtacgatgcgatggtttgtctggcgagagcatctttttcagcaagcgtcataccgtttgtatcccgcttgcttttcaccagatttgaacccgccattgttgcttcggtcatttttttaatgctttctgtgatgacggcatgaattttttcgggaatccgctcatttattttcgcctgcattcctttagaaaagcgttcaagcatggaatctttgcgcaaaaaacgcgctttccattgcagtgcttcctgtaccagctgctgatcgtcggtcatctgtgtctccttctttcattgaggtttcaaaaacccgattgattacagcttgccgtactttttcaatcttccgcccatatacgatggcatgatcacaaaaatcagaacggctgaagcaacggccgcatacagcaccccgctgactcccgcggcataggctgacgctgcgcagaacagcagcgcctgcacggttaatgacgatttcatcagcgaaaagaaactttgcagcttcgctttctgattgaccgggtaaagctcctgcagagaaagatgatgaaaatgcccgaacagcggaagaagctgtattcccgtaataaagacggtaaatacggttaacgccgccgtgatccacggattggcggaaacgagcataataatcaggataaaaataatcgtgagcctgacctgaatgccgagataatcatttgaacgcagaaaggcccgcgcatacatataggagaacgttttccgctgctcaaacggaatcattctgagcaaaaagtcgagatacgcccggcgttttgcctgttttttcaggtgaggcacatcggtaaacagattggcgattctgtaaaaccgctgcttccttcttaattcatattcaatatgagcttcccattttaatgatttatgttttgcggctgatgtgaaatacacataaaggccggccatcacaatgtagacggcggcagcgtacacataaaacgactgtaagacgaagtataaaagcagcatattgcagataaagcgtatgaccgcatccatcattttcatgcttctgtcattcataaacgtcatccgccactccatggcctgattccacgcttttaccgccagcatctgaataaatacggcggcatacgacgcaagcgacgcccccggacttacagcgaaaaacagaggcatgcatacaagagacagagcaataagcggaaacagctgtgacagatagctgtacttaaatgaatgcttaaagtatgtccccattttcggttcaagcggcagcagaaacacgaggtccgcttcctttaacagcgtccggacgtatgaaccggtcagcacaaatgaaaagagcaccgccatcacccaaaaagagggaaaatgaacggggatgtctttgacccacttgctgtaccagctcgccgcgccggcaataaaaaagatcagcacaatgacgagatgatcattgagcatatatttcatatacattctggtttcctttatatgctcttcaagccgggactgccaaatagtagacatattattcatggccggcgtcttccttcgtcagttcaatatacaagtcatcaagagctgcgtctttcatgccgaactgctctctcagttcttccagtgtgccgcttgcccgcacttcgccgttatgtaaaataatgaatgcgtcacagtagcgctctgccgtagccaggatatgcgttgacatcagcacgcttgatccggcttttttcgcggcgtccatccgctccagcaatgcattgatcgcaagcgggtcaaggccgagaaacggctcgtcaatgatataaagcgagggctccgcgagaaacgcgcacatgatcatgaccttctgcttcatccctttggaaaagtgagcgggaaaccatttcagccttttttccattctgaattctttcaaaagcggaggaagccttttttcaagcgtttctttggaaaggccgtacgccatggccgtcagctccagatgctctttgagcgtcagttcttcatacagcaccggcgtttcggggatgtacgtaaattgcgagcggtagctttccttatcctccgaaaacgtcttgccgttcagctcgatcgagcctttatgcgggtccattaatccgataatatgccggatcgtcgtgcttttgcccgcgccgtttaatccgatgagtccgacaatctggttcggctcaagggtgaatgaaacattttttaagaccgggtttctcgtataaccgccggttaagtcttttaccgatagcagagacataatttctccccttctgattcgtttttcttcatagtaccaaaaataaagtctgatttgaaacgattccctttttttctcacgtgaaaagcgtgcatagttatcgttttggcggacatcataatgtatgtagaaggaaacagctttaatcaactgaaaatgaggtgtttataaaagacgtcttagaacagttggatgaaaatcaacatgtcctgtgcttacaatttcttcacacactgctttgatgatgttcttcattcatgatgaaataatcaaatgaggtgtttgtcccaggaatgattaagcagacccataagtcttcattttaaaaacaaatgaggtgcttacaaaaggcatatttaattttctgtgataaagctcgtacttctgcatcagggtgaacgcgcagccgttcatcctgttttttgttttgaccgtttttgtggtacgatgagaatatacatatatttcttttcagggaggaaacccatctatgcacaaagcggacgattgtattttctgcaaaatcattgccggtgacattccgtcttcaaaagtatacgaaaatgaacatgttgtggcgtttcttgatatcagccaagtcacaaaaggccatacgctcgtgattccgaaaacacatatcgaaaacgtgtacgagtttacgcctgagctttctaaagaatatttcgaagcggtgccgaaagtcgcacgcgccatccgcgatgaattcgagccgatcgggctgaatattctcaataataacggtgaaaaagcgggccaatcggtgttccattttcacatgcatatcattccgcgttacggaaaaggcgacggtttcggggctgtctggaagacccacgccgaagactatacgcctgacgatcttcaggagatcgcttcaaccgtcagaaaacggcttgcctcatcttaaagatgaggtttttttgcgtccggcaacacaaaaaacataaaattatattttttcatatcaaaaaaatcaaaaaattgtgataggataattgtattatttcttacactaaagcggaaaacagggagagatcgtaaacatggaacgtacaacgaatttcaatgcaggacccgcagcccttccactggatgtgctgcaaaaagcacagaaagaatttgtcaacttcaatgacaccggcatgtccgtcatggagctgtcccaccgaagcaaagaatatgatgcggtgcatcaaaaagcaaaaagccttctgaaagaactgatggatattcccgacgattatgatattttatttcttcaaggcggcgcaagccttcaattctccatgctgccgatgaactttttaacgccggagcaaacggctcacttcatcgtaacgggcgcatggtctgaaaaagcactcgccgaggcgaaactgttcggaaacacatccgtcacggcaacaagcgcagattcaaaccacaaccatataccggaagcggacctcacaggaatcaaagacggcgcctacctgcatcttacgtccaataacacgattttcggaacgcagtggaaagagttcccgaattcaccaatcccgctcgtagccgacatgtcaagcgacatcctgagcagaaaaattgatgtcaaaacgtttgatgtcatctatggcggcgcccagaaaaacctcggtccgtccggcgtcacggtcgtcatcatgaaaaaatcatggcttgaaaacgaaaacgccaacgtccctaaaattttgaaatactccactcatacaaaagccgattcactgtataatacgccgcctacatttgcgatttatatgctgagcctcgtccttgaatggctggctgaaaacggaggtgtcgaagcggctgaacggcgcaatcatgaaaaggccgacgtcctgtacggcacaatcgacgcaagcggcggtttttacgcggggcatgccgcaaaagacagccgttctcacatgaacgtcacgttcaccctccgcgacagcagtctcacgaaaaaattcgttgaagaagcgaaagcggctaaaatgaccggactcggaggccaccgctcagtcggaggatgcagggcgtctatctacaacgccgtcagcctggctgattgtgaaaaactggctcagtttatgaaaaagttccagcaggaaaacgaataaatttcttctaacataacggttcctttgatatactgtttgcatatcaatttttccggccatcgcaataaatgacgagcatattattggatggcgaaaaagcttagcagaggagagcttagtatgaaaacaaaagaattagtcattatggccctgtttgcggcaatcggagcggtgcttcattccattatgccgccggtattattcggaatgaaacccgatatgatgcttgtgatgatgtttatgggtattctgttatttccccgtgtgcagaacgtgctgatgatcgggattgtaacgggaatcatttccgcactcacgacatcttttccgggcggacagcttccgaatatcattgaaaaaccggtaacggcgtttctgtttctcgcgctggcgcttttggtgaaaaagagcgtgaaaacagcggccgccgccgtcattacaatagccggcaccttcatctccggtttgctctttctggcgctggcccttctgattgtcggcctgccgggggattcaccgccttggtgctcgcggtcgtccttccggcggctgcgctgaatgcgatcgccattatcattatgcatccgattgtgcagacgatcttaaaacggtccaatatgattgaaacggtgaaataaccgcataccgaaacctcttccggccggaagaggttttttaatgtgtttcagcatgttttatacgagaagttttgtgaaaaagataaggaacaatgcgagggcggttcctgctgagcagacgatggccttttggcggacgacccgcttcggcggataagaagcggcctggccgagcagtttcaggtaataaacggcgcccgccgcaaagacaagagccatacaagataaaacaatcataaagacagacaaccttctccctccttttcccttaaaaaatatgctaaaataaagcaagctatgtatagaagtttattcttctgaacaaaaatgataaaagttatgagaaaaaaaacggggtgattttaaatggctgacggacgttcccttttaacaggccttttcgtaggcggattgatcggaggcgcagcggtgttactttcggctccttcatccggaaaagagctgcggggcaaaatcaaagcgaattgcaattcaattgaggacacaatcaaacggttaaaaaaagacggaatggcgcttaaagaccagcttgtccaaacggcgaaagaaagcgcagaagtcattaaagacgtaggcggagagcttcagaccagcattaaaaggtggcaggaggaaatcaagccgcaccagcaggatcttcaaaaggaaatcgctgatattgaagagaaaatcagacagctggagaaaaccttacaaaactaatatcctatacaaccaaaaaaagtgcgggcatattgcgttccgcacttttttttgcggtttaaagcctttcacagcaacggattaagaatttattataaaattcttaaattttcatctttattaatctttattttattggcataatagaggaaaagaaaatgtgaagcaggtgatctgtattgaatcgtgttgaaccgccttacgatctaaaagaagctttaatctatacccaaaaaatggcgcagctgtccaaagcactctggaaatctatcgagaaagactggcagaattggctgaagccgtacgaccttaatattaatgagcatcatatattatggattgcctatcagcttaaaggagcttctatttcagaaatcgccaaattcggcgttatgcacgtatcaactgcatttaacttttcaaaaaagcttgaagaacggggatatctgaaattttccaagcggctgaatgataaacggaacacgtacattcagttaacagaagaaggggaaaatgtattcgaaagcctgcttgaggagtttgacccgtctagaaacgcggtgtttaaaggctcacagccgatctaccacttattcgggaagtttccggaagttgaagaattaacctgtgtcatccgccacatttacggcgaagattttatggagatattcgagaaatcattgacaaacataaacaatgattttgatagtgaagacggaaggctgaagaaaaaaacagacgaatcggctgtccatgaaacggctgaagagctggaaccgatcaacagttaatcaaagtgcttcattatctcaataaattcttccatcagcgctgtataaagcccctgctcatacagagcaaaaatcgtttcatgaacatctaatttttcgttcagctgtcccgcaaaaagcgcaaggagcttgtcaaacgtcacaaagccttgcgctttttgcgactccagctcgtcctccaattcgcggcagatccgcccgacctcttctccttcttcttcggtcagccctttttcaatcatcatcgcataaaaagggtacttatccatatccaccgttttcaccagcaattgtatgtaatattctaaacgcccgatacgctgatccattgaatccatccgtttcacttctttctatctttaatcttattttagctgataatgaatggagaagaaaggttaaaccgtacatttccatgtttcaccgagctcttctgttcttccctttccggggttattttttttctttaaaaaaggattgattttttctcctgaagagagtaaattattttgagattgtattccatctttgtacggaaggatgactctgatgaattgctggaaaaccattaatctgatcaaagattatggtgcggttcgtttattattgactgctgtaggttttatgatcctgttttttatatgcaacttcttggcattcgggctgctgcgtccgaatatcagtttaagtgacgggcacgtgtttgctttttgtgttctgctcgttgttactttatttgtacataaagtcatacatgtcctgccgatgatctgtaaaaaaagaaaaaaggaaatgaaaatgtacttcttgcggatgccgacatggaaaggcataccgaaaacgacgatgctgatttctacgatcagcccgtttttattcattacgccgctattgttttatgccggactggcatttccgagacacgctcattacttttatatgatttcgagcattcatgcgggttattgcctgcctgatcttctgtttgcgctgcacctggtcaaagcgcccaaatcatgtctgattgaccaggaatccgacggttttgatattttagtaaaaaaagtgccggagtcttgatatcccgctgatttttcaggttacattctatcttttttaataaatatttggtaatgtaatatgggagcagttcagagagagggggaatctcccatcattttattctattttatcgtggctgccctgtttattctttattttataaacaggctcacaaatacattatgccttgtcagagagattcctgaagaccggcaggataaggtattccgttttattaatgtatctattttaattttactgatctcttcattcgtcgagatctcctttactgtgtaaacaggcaaaaaaatatggctgacggaggtctgacccccgacagccatatttttttcttaataaagccaagaagcgccgatgatgatcaataagatgaacagaacaaccaataatgcaaaaccgcctgcaaatacttcacccatctccaaaagcacctcctacaaaacgttttatttttccaattacatcatatgcaatttacttctgaaacgattaggcgcccgggtaagaaaacggatcgcttttagaaaaagcgatccgtttcgcttaacaaatgtaagctgcacctacgatgataagcaatatgaacagtactacgagcagtgcgaaaccgtttgaatatcctccgcccatggttcattacctccttttcatgatcaatatatttgtatgtatcaggaaaaagtttgactagacgaatgccctttatttaaaatctttttacagaaagccacaatatgttatgatacgcatatgcaatttaatttggatgattaggagtgtttaaaggaatgaagaaaatcgcgatagcagctattacggcaacgagcgtcctggctctcagcgcttgcagcagcggcgacaacgacgtgattgccaagacggatgccggaaatgtaacaaaaggcgaactctacacgaatatgaaaaaaaccgcgggcgcaagtgtgctgacacagctcgtacaagaaaaagtattagcaaaaaaatacaaagtatcggataaagaaatcgataacaagctgaaagagtacaaaacgcagctcggcgatcagtacagcgcccttaaacagcagtacggcgaagattacctgaaagatcaggtgaagtacgaactgcttgcacaaaaagcggcgaaagacaacatcaaagtgactgacgctgatacgaaagaatattacgacggcttaaaaggtaaaatccgggcgagccacattcttgtcgctgacaaaaagacagctgacgaagtggagaaaaaactgaaaaaaggcgagaagtttgaaacgcttgcgaaagaatattcaactgacaactcaaaagacaacggcggcgaccttggctggttcgataaaaagtcaatggatgaaacattcagcaaagctgcattcggtctgaaagtcggacaagtcagcgatccggtcaaaacaaaattcggttatcatatcatcaaaaagacagaggaacgcggcaaatatgatgacatgaaaaaagagttgaaagaagaagttcttaaacagaaattaaacgacaactcagctgtacaggcggcaattcaaaaagtcatgaaaaaagctgacgtaaaagtggaagacaaagacttaaaagacacgtttaacacttcaacttcttctgaatctaaataaaaaaaactgtgcgggctctcagcgagccccgcacagtttttttatgcgatggaatgattggagttttcttctgcatccgtgttttcacttgcgggcgccgccatacggcgctcgcgttcctgttccatccgttcaatatacacccttccttctttttcaataaacgactggtcaagcttttcctcttctttagctgttgtgaaaagcttataggcgctgaaaataattccgataatgcaaaggtatacccaccaaggaaaaaatagcacgtcggtttcctccctttttcacccagagtctttattctaagctatgcttgataaagacaagttatgagagctgaacgtaaaaaagaccgatcatagagaatcggcctttttatcttattgatggaacgtcggtttgtagaaagaacggttttccagcgcaaatacacgctctgtgtattcgcccggcttcacccgttccagcgctctgtccatcatgatcatttttgcatccagattgtcaatgtagtgcagaatttccgcttctttcaccatcggcggtttcgggcttccccattccgcttttccgtgatggcttaaaatcaaatgcttcagaatcagcacttcttcagcgtcaatctgaagctcttcggctgcttttgaaagctctgtcaccatgatcgaaatgtgcccgagcagattcccttccacggtgtacgtcgtggagacggggcctgaaagctcttttactttgccgagatcatgcagaatgactccggcatacagtaaatcccggtcaagagacggatacagatcggcaatcgcttttgccaggttcagcatggacactacatgatacgcgagcccggagacgaactcatggtggtttttagccgccgccgggtaatccataaactcagccgcatattttttgaccagatgtcttgtgatccgctggatatttggatttttcatttcaaaaatgtattgagtgacggtttccatcatttcatttttcggaatcggcgccgtttccagaaaatcatcaatgctgacattttcgttctcgccggccggccggatgtttctcagcttaagctggtttcgtccgcgatagtgatggacatctccgatcaccttcacgatcgtctgcgccgcgtacgttacttcatcagtcggcttggcatcccacagcttcgcttcgatatctcccgattggtcctgcagcattaacgtcaggaatggttttccgttgcttgcgattcccttagtcgaagatttaatcagaaagtattgatcgacctgctcgccgacctcgtgcagcataataccttttgccattctattaaaagctccctccatatcttacataataccagtatagcacatacctcttttttgaaaataaactcttttatgacaggagccgcatgacttgtccgctgtgaaaagaccggctgacatgctcatggcaggtgaaataaagtatctgccgcccgccttctgaaagctgattcagcacatcaaacagccgctccagccgctgcctgtcaaaatggacaaaactgtcatcaagtaaaaacggaagtgataccgcagattccctctctgacgcaagggcaaaacggatcgccgcataaagctgctcgcatgccgcctgtgacagttcgcctgctgaaaacacagttccgtctttccgcatgaccataatggaatcatccgcctcggagaaatacaatttatggtaacgtccgtccgtaagcggtccgtataatgcaccggcggtttctaacagacggggaagcgtcacttttttatgccgctccattttttccctgatgatgtgtctgaccgtctgtaatgcggcccactctttagcggtttttttcacgcgctccttctgcatttctgtctgctgttttaaatcggatacaagccccgaggactccagctgctcttgtttcaccgttaataaagcggttttctcacggagctgcgcgcttttttcctcaagcgtttttttctctgtttccttctgaacgactgtatgttcaagttcggacactgtgcggctcatatacggctcaagctgttttccgcctatgccggacaagtgcgttttgatttcgcgcagctgccgctctgtttcccggcggctttcattcagtctggcgagttcacaaaagtgttcgcgattttttgcgcctgccgccatgaaaagctgtttgacctgctgttcgtagtaatggacttcttcgtttaattcacgcatttgctcttgtgcatgcagcagatccgtttcgagcgcctgctttcgttttgcttcctcacgggcccgttccgcctgtaccagcaaaacgcgcagtctttcttttacggacagctcccttccgtctgaaggactcagctttttgacccggtcctcaaatgctctttgcaacttttgcagccggcccgcttcaatggtcagctcatgcttattaaggatttcttttttgacatctttcatcacatgatatgcgtcaagaagatgggaaggacttcctgaaaaacccagttccttcataaaaagttccgcctgtttttcagacggcgccatttccgcctcccattcttcatattggcggatgactctttcatatgccgcttctttctgttcaagcacggcttgatccgcaatcagctgctgccggtgccggccgtcacgccaaagctcttcctgcagaaggtcagccgcttctttggagatcgtcggcttctttttcttgtgaccggcccctcctctttctgacggcagcggtttttgcatgccggacagcatatacagcagcagagcgccggtaaaaagggcggcgggcagccattcctttaacatagcgaaaatcgcaatgaacagaatgcccgcaccgagaaagagctttttttgtttggcgcgctgtttttccagctgctgtacatgtgcctgccattcgtttccttctgtatcagccgtttgcttatatgattgtaaagcggcttctttttctttcctgacagcggggtccaaaatgttttccgacgtcaaggcatgttttcgttcggcttcttccagctccagccgcgcttgttcgaaaatcgcatcaagctgtgtctttctttctcttgcctgtccggcgctctgcacggcttcctgcagccgccattcatattcataatcggtgttcagtgaaagaatgccgtcttcctcatgtcttccgagctgctgcaatcctgacaaaacgcgggcagatgtctgccggatctgtgattggatggcggcaagctgttcaccgcgcgattcgtacatatgctgctcgccggaaagctcctgcagctgccgctctgtttgcagcaagtcctcatttggagcgagcagctcagcctgccgcctgagttcagcagcttttgcccgaagtccctcaagacgggcagctttcggatggagatgcgattcgtatttttcaagctgatgcatcccgtccttcgggaattgcttcaatgcatccggataagaagaaagttcgctttccaaggctgtttttttgtctgcgagcggctttgcttctatcgccgattttactgttttgatttcttcagttatgtctttcaatcgtgcttcggcatcctgcaaacggccgccggcgctttttttctcttccagaaggctgtgatagcccgcttccgcagcttccgcctgtttcagctgggcgctgagccgctttaatgtatccaactcctgatttaagcgggggttccgcccgttcggcttatacatcctttcaagttcttttgccagccgcccgtcaagctttgccgccgcttccgacccgaataagctcgaatacaggagaaactcgccgattttgtcccggttaaaagcttgaatctcctgcagtccgaatacatcgaacgaatagatcgcttcgtacagcgcccggtctgtatcggagagaagctgtttgagccattctccgtccttgatttcgcctgaagccgtatacactctgactttttcggcagcgccttttgtccgttcgattttgacggcaccgtgatcgccatgcttcaattccacagtgccgccgtaaaccccgccgtttttcggttcgtatttttttgatttcggaaaaccgaacagcacgcttttgatgaaggacatcaatgttgttttacccgcttcatttaatccgtagatcacttgcacgggagaatctgacagctgaaaactttggtcggaaaattttccgtattggtaaatatgcattgccgttattttcatcgctgaagctccttcatctggcgtcttaaaacggcttgagcctgccgcttaatatccagtatctcttcatctgtaaatgaagtgatctgacgccgatatacgggatgacgctcaagggcttcaaatacaccgctcatgtccgcgcattgttctatgtcctgaagcagccctttaaaaaacggatcgggcggcacgctgtctgtttcatccgtccgatcctcaagcgcaagcggccagacgaaacattcctcttcggcctcttcctcctgtaaagcggaaagaaactcctctgcgatgcctgcgggcgcctccgtccaaaagcggggcgccgcgccgcgaagcaccagcctgacacatgccgggcggcccgccgcgcgcaagccggagaatgtatccgatgcggctttcagaagtgaagtcatatgttcagctcctgagatatcaagatcaatttcctcccataacacatcatgcgcttctttgaattcccaagacatctcaccgtttgccgcccggacgagataatatcccttaggcccggtttcttttaaatgccgggcttgaatattcccggggtaaatagcggcgggatgctgggcggacagaacctgccgtttatgaatgtgtccgagcgcccagtaatccatgccgcttttttcaaggtcttctttcgtaaacgggcagtacgggtcatgcccttccgctcctgataacatgccgtggagcatgccgatatgataaggcgcgccggtcattttccggtaacgggccgcctgattgaccgttacgcttctttcctgatagctgcatccgtatatgcttgccgcaagctctccgtttttaaagaaagatttttcctccggtgtacccgaggtgaatatatgtacattttccggccattcaatcggcgtccacttaccgcccaaatgatcatggttgccgaatatgacgaacacttggatacccgcttcctgtaatctcgtaaactgttttctcaaaaacagctgggcttttaaacttctgttggcttcgtcaaacagatcccccgaaagcagcacgaaatctgcctgctcccggagtgccccgtccgtcagacggcggacgctgtgaaatgtgctttctttaatacgcgcatataccggttcaggcagattcgaaatgccgtaaaacgggctgtccagatgcaggtcagcggcatgaataaacgtcagatcagccatctcgccctcccctttctgcagattgaattacccttattttagcaccgtttttatacgaatgcacgttctgtaaaataaaaaaacagcccggctgttccgggctgtttcatttattttttggagatgcgcagcgcttgtttgatcgctttgaatccgctggcgtttccgtaaatcaaaacgccgcctttgtaaattttcgcgccgaccgccgcaaagatcacgatagtgaccagtgtcagggcgatcccggccgcagcctgccaaaacgggatatcgagcatcccgacgcgtaaaaacataatcatcggcgtgaaaaacggaatgtaagatgtaacggtaataaaaccggcgtcaggattgccgatgccgaacatggcgatcataaaacctgccacgaccaaaaaaaccatcggctgaatcgtctgctgtacgtcctctatccggctgacaacactgccgagaaacgcggcaagcgtcgcgtaaagaaaatagccgagcaaatagaaaatgacggcatagactatcgtcgagacgggaacatccgtaaaattgaggaatgcactgatcggcgacgacgcatcattttgagggttcagcttcagtgagagataacccgctgcaatcagcaccgcaaactgtgtgatccccacgagcgcgataccgaacagtttggcaaacatctgctgaatcggcggcatgcttgaaattaaaatttccatgacgcgggacgatttttccgtcgccacttccatcgcaatcatgcttgcgtacatgataactgagaagtagatgacaaacagcatgatgtatacaagccccattacctgaccgagctcttcctcagatttcgcccctttttccagcgcgtctttgctgacttccggcggagtgtagaggctgctgactttttctgccgaaatgccgagcttggcggtttcgacagcggttttcgtctgggttaaagcctgcttgagcagtttatacgctgattcatcagaaatggtcagcgccttgtatgctcccgttatcgttcctttttgatcctgtctgatgataaacagtccgtcccattcaccgtctttgacacgctttacggcatctttttcggactccttcgtctccattgcctgcagatcattgtctgtatccgccgctttaagctgttttgcaaacgccgggtacagcccgcccgtttcatcaatcaccgcgatttgctgcttgccgtcatccgattgaaacacggaaataatcgattgcaggttggtcaccgctaatactaataaaacggtaatggcggtcgaaataatgaatgactttgttgcgattttgtttttatatgtatgaaacagcataatccaaaatttattcatatacggcccccaccttttctataaaaatatcatgcagtgacggctcttccaattcgaacttccgtataaaacctttcccttgcagcgcccggaaaatatcctgcgaaaccggttcattcgcgacctgcagtctgattccgtcatttgtttccttccatttcacgacaccttcatgcgtttttaaaaagctgaggtcatcatctgaatgaacggtgacattttttttgccgaaagaccgcttaatgtctttcagattgccttgaacgacgggttttcccttctggagaatgcacaaattctcgcaaagttcttccacatgctccattcggtggcttgaaaaaacgatggaaacgccgctgtttttcaaagaaataaccgcttctttcagcagctcgacattcaccggatcaagaccgctgaaaggttcatcgagaatcagcagttcaggcttatgcaggacggccgaaatgaactggattttctgctggtttccttttgacagctcttcgactttcttattcttgtaatctgtaatgccgaagcgttcgagccatgtcatgagctctttttccgcctcttttttgctcattccttttaatctcgccagatagacaagctggtcactcaccttcactttcggatacagcccccgttcttccgggagatagccgattttttcactgatggaataattgaccggcttccctttccaggtgatatgcccgtcagtcaggcttaaaagacctaaaatcatccgaaaggtcgtcgtttttcccgcgccgtttgcgccgagcagcccgaacatttccctttcaggtatttgcaggttcaaattgtcaacagcggtaaagctgccgaatgttttcgttacattttcaattgtaagcacgaatccaactccttccttgacccattatatactaataatgggtaaaaattaatggaggattttaaattctttatcagaatatcattctataaagggggtgacatgatgggacaatatgtattgaccgcattccatgcgtcgggagaaacgctgctggatgaacggatcgaagcagataatgaggcggaggcgaaggccgccggagaggctttgttagaggaaaaaaagcttgagaacagtactcaccgcttggtaaatgaagccggaaagctgattttattccacagataacagaagctttccggcttctgtattttaccggttaaattgcggcgtccgtttttctaaaaaggcgcggatgccctctttatgatcatccgtttttctcatattttcctgggcctttcgttcaagagataaaacgtcttttaaccggctgatatggaggctctgataaatagccttcgtttcaatcatcgctgacagcggcgcatgcagcaatcggtcgatatacggttgtgcccctccgcagggccgccgctgaacagcccgtcggcaagcttgagccgcaccgctttttcagccggcaatttttcaccgctccaaatcagttttttcgcttcgatctcaccgacgcgtctcattaataaataatggcctcctccgtcgggaaccaatccgatgccgatgaaattcatcgcgagtcgggcgttttcttcggcgagcaccacatcggcgcacagcgcgaaactcagcccgagccccgccgcggctccgtggatggcggctatcacaatttttttcatatcatagagcgtcagcgtaatggattcaatcattttcatgagccgttcatattctcccgaatcatgatccgacgtcatcatctggatatcaccgcccgcggaaaatccccggccttcccccgcaagaggacgataagcgcttcgctgtcggctgccataacgcatgcattttccaattcccggagcatttgttcattcagcgcgttgtaactgtcaggacggttcagcacaatctctgcgatctttcccttttcttcataacgaatatactgcatgtttactccctccttgaatccgcttacatattttgttcaaatgatatattccttcccccgaagcgaaactcctttatttttcaaggtcaacagataccgaaaaatgcatatcatttgaaactgaacatacatttttatatagtgaaattgatatacaaaacaaaaagggggaaaaacaccgataatgaaatatgtgatactcagcttgttactgagcttttttatggtgctgttcccccttcggatgtcgctcttccttcccaattggtgacagaaacagacagccatgtacaaatttcggtctacccgcaggaaacggaatcggcaaagacgccggttcaaaccaaaaccgctccgcaaggcctgtcaaaaggatacggtgcgttatcccggatgatctccctgttatctgtcaaacctcttgatcaattcattgattccacaatggaaaggacatgcgccattccgatacaataccagtcaaattacctccggcatcagaccatttctcattgccaatctgtatttacggtgtaaaaacagtatattccggagggattttttatgaatattaaagaaaacgatctgcccggcatcgggaaaaaattcgaaatcgaaacgagaaatcatgaaaaaatgacgatcatcattcatgatgacggcaggcgggaaatttacagatttgatgaccgcgaccctgatgagcttctggcaagcatttcacttgatgatgcggaagcaagacagattgccgcgattatcggcgggatggtgtacaaaccgcaggcgcttgaatcgattgaaatggcgttcagcgatctgattatcgaatggtttaaagttgaaaaaggggcaaaagcggcagggcggacgctcggcgaactggatgtgcgccaaaactatgacgtgacggttatcgccatcataaagcatgaccagaaaaagtttttaaacccgggggctgattcgctccttgaagcaaacgatacactcgtcctctcaggtgaaagaaagcatctgaaaaaactgatccaagacttcctctccagagacggagtgtgatctgtttatggaccatctcgtatttgaagtcggtacggcgttagttcttgtggccattgcgagtgtcatcgccaataaaattaaattctcgatcatccccttcctgatcattttaggaatgcttgtcgggccgcacgcgccccaggcgggcatcattgatctgacgtttatcgaaagccgggaagtgattgaatttttcggacggatgggcgtcctgttcctcctcttttacctcgggcttgaattctcagtcggaaaattagtcaaatccggacgttcaatcgccgccggcggaacgatttatattctgattaatttcagtttagggctgatctacggatttatcacgggcttttcctttttggaagtgcttgtattggcgggcgtcatcacgatatcatccagcgccattgtcgcaaaggtgcttgtcgacttaaagcgcacggccaatccggaaacggagctgattctcggcatcattatgtttgaggatatctttctggcggtttacttatccgtcgtttccgggcttgttctgggagacgcgacgtctgtcgggggcgcgctgatgtcaatcgtgatcgctttcggatatatgctgctgtttttcattgccgcccggaaattgccgcctctgctgaacaagctgcttgatatccgttcaaacgaggtatttgtcatcgtcattttcgccgcgctctttttcattgccggcttttccgaaacgattcatgtcgctgaagcgatcggcgcgctcttgctcgggctcgtgttttcggagacggcccattctgacaggattgagcatcttgtcgtgccgttccgtgactttttcggcgccatgtttttcttcagtttcggcctcagcattgatccgttttcactcggagatgcggtatggctcgccctcggcgccgttctgctgacgattgccggaaactttatcgccggcatgatcgccgggcgccgggcggggctttctcataaagcatcgtccaatatcgggctgaccattgtgtcccgcggcgaattctccattatcgtcgcaaatctcggcatcgccggcggcctgtccgcttcacttaaacctttcgccgccttatatgttttgatactggccatcttcggccctttgctcacgaaagaatcgaagcggatatatctcctgctgaacagcgtattcaaatggaagacgcctgaaaagaagccgcagaaatcataaaaaaaaactgacctcttcataagaggtcagtttttttgagcgggaagaaattgctgaaaagccgtttttttattaatggagaaatgctcttttcccagaatggtattgatgattttttggtttctgtaaacagacagcttcaaattcgtagcgcccgttccgtgagcatgatcaagattcgttaatgtgaaaaaatgatgccgtctgtcgtccttaaagacaagacgggaatcggccgtcactttaaaccgtttctcatcctcccattcgatatcgggggcgattgccgtaaaccattccggaatatgaggtttaaagccggtcgccaatatcactttttctgaatcggccgtaaaagtttcatccatctgccattgatgaaagctcagtacacagcgcccgttttgcttttcaattttttcaagctccgccatcggctgaatatacacgtcaggcgaacctccgctgatcgatctgtgatacagggcgtcgtaaatggtggcaagtgtgtcagaatcaatgccgtggcgcagtccgtccagctcagggagtgtgttcagccgttctttaaaaggcaggcggttaaaatattccacataatcaggtgtaaacatttcctgcccgagcttggcggtttccaattctcgaaatccggcggagcgtgtcacccattgcagccggctgcgccggtattgttcatcatgcaataagtcagaaaagatctccgcggcgctctgtccggagccgaccactgtaattgattcggcgccggcgagctcgtctttccggaacaaatattccgtgctgaccatcgtgtcctgacgcgctccgtcatcaatctctgcgggaataagcggttcagaccccgtccccatgacgaaatgcttcgtctgatagacactgatgcttccgtcctcaatgttcttgacgctgacttcataatgtccgccggcatttttcacgccgattacctctgagccgaaacggcatgatttgatttctgaagccgcccagcttaaatagtcgttaaattcccgtctcggaatatcaaattcattaaacgtataaaaccggtacagccggtcatgttcatggagaaagtttaaaaacgtgtagcggcttttcggatcggcgagcgtgaccaggtccgccagaaacgccacctgtaaatccgttcctttaattaatagaccgggatgccacgcaaattctttctttttatcgaaaaaaagagcgtctgttccgggtatatcctctaacaatgcggcaagccctaaattaaacggcccgattcccgctcctatgacatcatacatattatgcacctcttgcgaataacagtctgatgatcttttcccgtttttacagacggttaaacataaaaaaacggcacgctgattccgtgccgtttttgatattataatgcagatttgacgaacatctcatctaagtatttgattttctcttctgtataatgctcgaatcggtcattatatgatttcgggtctttcggattggcgaagtgcgtgatttttccggtttccggatgaatgaatttgcttgccgccccgcagccgataccgataatcgtctgcacttcttccataatcataatgttgtagatgctttcctgacccgggaaggagtagccgacattttcaaggtttccgagaatatttttctgccgatacaagtagtacggcgtatagccgtgctcttttgtccagcggacggcgtcatccatcatgcgggacacttcctgtctgtcggcaactttatacttatgcttgtttctcgtcatttctgacgcccgtttaaaagaaagcgtatgaacggtcaaagattcaggcatcagcttttccgtttcttcaagactgtgcctgaactcagccgtcccttctcccggcaggccgatgatcaggtccatgttgatattattcatgccgtgtttgcgggaaagatggtatttttcgatggtttcttcaacggtatggtgtctgccgatagccttaagcgtttcgttttcataagattgcgggttgatgctgattctgtcaatcttatacttatttaaaacggcaagcttttcctccgtaatcgtgtcgggacggcccgcttcaacggtaatctccctgatattcgcgacatccgggaaagagcggaccatttcttcatataaaagatccatttcttcagcggtaatgcttgtcggcgtgccgccgccgaaataaatggtcgtcactttgatatcatgccgcttcagccattctccgattttctgcatttcatagtgaagcccccataaaaaggagccgactcttcccgcctgtccttgaatggcataagccggaaacgtgcagtaggcgcacttcgtcgggcagaacgggatgccgatataaatgctgacttcatctttgacccggtacagatcgggaaccgcagcgagctggcggtcgacaatctcctgcatcagattgattttttcatcatggatcagatagtcttttttcagatcggcatgcgcctcttcttttgtcaggccgctctgcagctttttatgaagaagtttagtaggcctgatgccggttaagattccccatttttgtgtcatgcccgtatgtgattgaagaagatttaagtagacatatgacagcgtgtttttcacctgtttaaatacttctttttcgctccatccggcaagaagcggtttcgtgtgatgttccttttcgccggttcctttgatttctccggataccgacacgctgtctgcatcttgagaaatggcaagtgagatgacgagatcagagggttcctccgtttcgccgtacgtaagaacacactcttcaaaaaataaattcgcgatgttttgcagcggacgatgcagcctgtcatccgttatgccgtctatttttatttgcaatgtgatcaccttatttttcagattcaaaactttctttagtgtacagaaagaacaggctaaaatcaatccgcgaaaaagccgcagaccggcgtttcgcgtctgcggctcttgattacggccgtttcatatggaacttatcgagaaagcctttgcggtgctgcatgcggaaatattccttaatcatataagccactccctgttcatcatttgaccttgtcacccagtccgcttttctttttaattcatttgaagcattccccatcgcgacgccgagaccggccagctcgatcatcggcagatcatcttcctgatggccgatagccacaacctcttccattgaaagcccgagatcagcggcgaccatcgaaagtccgctttcttttgaaacccctttaggcacgatgttcagtttttctccgttgacgcggatcacatcgacggccgggaatgctttcattatcgtatccgttatatcagcctgcaggccatcttcagcatgcacttcaatgacgggcgctgaaaccggctcatcaaggagcaggtcacttaatgattcgacaaactgcaccggataaaagatcgggtcagacggatgaatcatcgttttcccgaccagattggagttcactttcttcttgttaccgatcgaatatttttcgtgaagaagccggatattgcattgatagctttcgagcacctgaacgatattaaacgtgtgatcttctgatattttcttttcaaaaaacggctcatctattttttcagaaatgtatgcgccgctgtgggtaatcaattttgcattcagctttaatattttcgccactttttgagcggagcgaaaatggcggtttgtgaccagtgtgacgtaaatcccttttttcttgacgtattcgatggcatcctttgtcgtctgatgaagtttgccgttggagcgaagaagcgctccgtctatatttaacgccagcatttgttttgacacagagaagtcccctccttgatgactgtacttgtcattaggatatgaccctgtctctttgtttagaacaaccttttctccgcagcaaaaaagcctgcctcaagcagactttgaactgtcgttttgttgggatacgatcgatttgctgccttctccccaatgtgcatttctattaacgaaatatatcaggaaccccttatttgaccgttgatgcgctcgtttcacttactctctgttgctaccccttaacataccaggcagtataggcgaccgtatccttagatcatctgtaagtgtaggcgctttcagagttattatctcaataatattgttaaaaaacaagggtttttttaactaaaaaaatcaggggaactatctgtgctgaatgtatgataaaattgaaaaggaacgtatattcgcatataataaaagaaaaaaagcggtgactgtcatgtctctattaaaagatatttataacgaagaatttgcagaagcacttctgcacagagtcaaatcggcgtatccggcttttgagcgggacaagtgccgggcgctgatatttcaggaagattggcccggactgacgttaaaacagcggatgcgccggatcacagactctttatatgaaacactgccgaaggattacatacgggcgcttgacgtcttatatgagacagctccccatttcacagggctcgccgggattatttttcccgattatgtccaacagtacggaacggatcactgggaagaatcaatgaaggcgcttcagtttttcactcgtttttccacttccgaatttgcggtccgcccgtatatcaggcttgaccgggagcggatgttcaaagagttcctttcctggacggagcatccggacgaacatgtcagaaggcttgccagcgagggctcaagaccgcgcctgccgtggggaatctccattccggctcttcttgaagatccttctccgattctccctgttctggaccgcttgatgcaggatgactcgttatatgtcagaaaaagcgtggcgaataacctgaatgacatctccaaaacccatccggatcttctggcacagaccgcagccgagcggttcggaagctgtccgcacacggattggattttgaagcacgcctgcaggacactgttaaaaagaggagacaaacaggcgcttgcgattttcgggtttgaagacgcctcccggatttcattggaacgttttacactgaattcggaaacggccgccatcggaacaagcatacatttttcttttcagatccgctcagccgcccggcaaaaagtcagggttgaatacgcgattgattttgtaaagaaaagggggcaccgcagccgcaaggtgtttaagatgtcggagtccgccatggataacggaaacgtaaaagccttcagcaaacgtcattcccttaaagatttaaccacccgcaagcattatcggggaattcacactctgtctgtcatcattaacggaacggtaaaaggttcgcttgatttttctgttgaataaaaaaacccctccatttcatagatggaggggtgtggagcttattgcgggctgccgtaaagctcttcaagaggtttcataatgattttgtttaactcgccgatcagcatgctcatgcgctgttccgcttccatcagctgagaaatcaattcatgctgctgtacgagagcaaccgttttttgtgcctgctctacctcttcctgagtgatttcttcacctgacatctgtttctgctgcagctgcatctgtacattgcggaagttatcaaacatgcgttttgcggattcatctgcgtttacttgatcataaagccctctcagacggctgtattcatcactgtttcgcaaagctttttcaagatcatatgctgcatcataaaaatgaactgccatagtaaccgctcctttcttcctttcggacataccactccactataacagactgcggagcgactttcatcatcggcgtatgttttccttagaaaagaatgacaaacaaagcctgaattgctccgattatcccgccgagcagaccgcctaaatacgttatcatcttaaattctctcttggaaatcgacagcaccatttcttccagccgttcaacgggaaactgatcaacctgctctttgaccacttcctcaagacgcagccgtttcagcacatcctccaaatgagcggcaatactgccgagtgccgcatcaagcagcttcggcgcgtacgtccccgtaatctccccttcataacgggagatgatgtcaccgagccggcattcgaaaaagggcgcggtttgaagtgcggccaaagcccgctttttcatgctgaacagcagatctttcgcattccacttttcatcggcctcataaagtgtataagatttgagcttgccccattcttgagaaagcagatcagccagaagctttttcgtttcctcattgcgcaaaaactttaacagctcaggcagcacacggtctgccaagcttgaattgccgaggaacatctgcaccatgccgccgagcatccccgggaattcaaaaagtcgtcaatcatatttccgagtctgtctttcccttcttcgctctcaaaataatcaatgctacgcttcaggatataatctgcggccagcgggattttttcatccagcttttcctgcagctcatcaggaagccagtctttgatggcgcggtgctcatatttccggtacaggtccgaaagcttttcatcggtaaaacggtcaatccaggcatccgtcttttcctgcggattccggatgcccgcggcggccaaagcttcgtgcaccgtcatttcggaagcggccattttttgcgtgaattgttcggcgaaaagaagcgcctggtttttaacgttatctgataaaagccgcttttttattccttccggggttaaaaggtggttcgtcaccatgagccccatttgttttgccaattcatcccgtcttttcgggatcagccccggcgtaaacggaacccgttttccgaacaggtaatacggccggtacggacgaaataacatctgaatggcaagatgattcgtcaccgcgccgatcgcggctccgatcacgatcataaatagaaacgttcctgctatgcccattccttttcttctgcctccatcttatgttctattttcttgatgatatatctattcgtattatagaggctggcgggcatgcgggcaaatgaagaacctgaattgttgtttgtgaggaataaggcaagatgctgtttcgtactctttacagtagatcatcttttatgatgcgcttagcatatttattggatggaagggccgttccatcagcggctttttgaataaagggggagtagtaatatgacaacactcggttttatgtctgtatcccgccggcacgaagaagattacgccggggaattggctgaaagagcgcctcaatataatgtgcgcttagcccgctttacaccgtttgatatatttccggattctttgcgcgtgaaagcgctcgtctatcacccgcaaagcggaaagtggaacgaaacggaaatcgatattcccgaatatatttacgaccgctgtttttacggaaaatccgctgaagcgcaaaaagccaaaccgatcgtcgaatggctgaaaaaatatccgaaaacggaatttatcgggcgggggcttcctgataaatggacggttacagatgcgctccaaaagcatcatctgatcagtccctatattcctgaaacggccgaagtcagccgctatgaacaggtgcaattatacttagccaaggaaaaagcatgtatacttaagcccgctttcggcgcgggaggcagaggcatcatcctgcttgaaacaggcaaaaaatcaattaccgccacttactatatcggaaaaaacaaacaaacaaaatcattttccaatcacgtgtcttttaagtcttggtgcaaaaaagtgctgcagcaccgctatttgcttcaatcctacttaaatatccaggataaagaacggcatccgtgcgacatccgcattttcatgcgcaaaacggagtcaggcgtttgggaaacggtcggaaaagcggtcagaaggggttatcagaacggtcttttatctcatttgcccggaggatcagaaccgattaagtttgacatatggtttgaggaaattccgagaaagcagcaggccgttttattggatgatgtcttttcgatcacccaatccgttccttatttccttgatgaacggttcggaccgctgtttgagctggggctcgatatttgttatgccaaagacggacgcatctggcttttggatgtcaattcaaagccgggacggaaagctattttaagcgtggctccggaggcgaaagaggatttgtatacgggtccgctgagacgcttccgcgaacttcagtcacaggacagcaggaagggagtattaccgcgtgaatcataaagggatgattgtcggcatcgataaaaaaagcaaaaatacgctgtttctcccctcctccatgaaacgggaagggcttttatccgctgccttcgggaccaaggttgtcaaatgccgtgtagccttttctcaatcacttgaaaaaagcgcgctcctttctgaagatttgtttgaggagctgttgataccgtataaaagccgggctgactttctcatacacggccagacggtgcacatcggaccgctgatcggcgttttcacagccgggttcacatcatcgccgtcccgcccgttaagagaccgtacagccttcttttccaagatgctctcacttcatgaacaggcgaacggatattgtttcgttttcggagctcatcagatcaactgggaagaaggcaccgtccaagcgctgatttataaagaaaacagctggaaacggacgtccgtcccgcttccgaatgtcgtatatgacaggctcccgagccgaaaaacggaaggagttccgcttttacagcagacaaaacagaggctgatgaatgactatcagattccgtggtttaatccgcaattctttaataaatgggacattcataagcttctggaaaaaaacagtctcaccgcttcacttcttccaaaatctgtcctgcacccgaatgcagaggcgttagagacgttatgcaacacatttgacaccgtctatatcaaacctgcagacggcgcactcggaacggggatttacagggtggaaaaaacagatgccggcttatctgtcaaacacacgaatgaggaaaaaacggtggtgacggcagagtattcagatgcggcatccttcatgaaatcatttaaagaaaacaatgacccgtccgcatttttaattcagcaaggcattgacctgatccggctggatggacgccccgtcgatttcagggtgcacacgaataaaaacgccgaggggaaatggacagtgacggccattgcagcaaaaatttccggtgaaaacagcatcacgacgcatctggcaaccggcggagaagtcaggacgttagctgaattatacggcgatccgcgagagagagtcggcatgatgcggaaactttccaaagccgccttggcggtcagccgcgtgttaaatgagcacattgaaggttttatcggcgaaatcggttttgacctcggcgtcgatcattcagggaaagtttggatgtttgaagccaattcccgccccgggcgcagcattttttcccatccgaagctgagatcggtcgattacctgacaaaacggagaaattttgaatacgcgtcctatttatcagaacggtccatcaccgccccggaaaaactttggcggtgaggctgtctttttttggttttacccgggacaggcacagaatgatgagctacaatgaacaagatcaacatttcctacaaggagcgtgaacgtcatgatttcgcacttcagctggaaaccgttattcaaaaaagagaaactgcccggatggcggatttcattttactggcagggtacgcattacgaaggggtttaccataagtccggtgacattgaatggggacacacacatccgggaaaagaagagccggctctcgtaaaagagctgcacgaattaatgctttatcacatatatgactgaaagctaaaagctcagccgcatcaggctgggcttttcttttcccttccgctatttaccacccggttttccgaatgagatgccctttgattcaccataatacgtagtacaaagcggcaaacagcattgggtgaagccgagctggcaatggttttcattccgaaaatcatcggctggtgcaattccagcaaacccaaccatactacttaataaaggagatcatacaaatggcaaacaacaactcttcaaaccaactattagtacccggcgctgctcaagcaatcgaccaaatgaaatacgaaattgcttctgagttcggcgtaaaccttggcggagaaacaacttctcgtgcaaacggttctgtcggaggagaaatcacgaaacgtttagtatctttcgcacagcagaacatgggcggccaaggcgtacaataactcaataaatggcttacagaaggcgcgggataccgcgtcttcttttatgccgtcacccttttttcctattccacataccctaggaaaaaaggagggaaaacatgtcattcattgcctcagtcaattgggagctgtttcagttcgtaagtgtttctttggtcaatgaatatgttgcccaccatttcccgtttattcacaggcattcttttccccgctgctttgaatgatataatgagcggcgaggaggttttttacatgaacatcgctttactcggagcaacgggaagagtcggacaggcttttataaaagaagcgcagaaacatggacacatggaaatattcgctcttgtcagatcagccggaacagtccttcccattcctgaaaaacagatcataacagggaatgcgaggcggcgggaagatgtcagccgattgatttccaaagcggacacagtcgtgagctgtctcggcacggacggtgacgataccctttcagccgctatgacccatataatagacggcatgaaacggcatcatgttcagcgtctgattacgatcggcaccgcgggtatccttcaatcacggcttatgcctgatcaataccgttttgaatcggcagaatcaaaacgaaaatcaacaagagccgcaaaggaacacgcccgcgtatacgagatgctgctggcagaggatcttgactggacgatcatctgccctacctaccttcctgacggagacgctgccggagtttaccggttcgaacaggatcgccttcctgaagacggcgccgaaatcacagtcggagacacggcacattttctgtaccgcgagctgatcagcccgcagtttgtcagaaaacgggtaggactggcttactgaatgaaaaaagggcgaatcttttgattcaccctttccgattacaccgcggatttcgccgttcctttctgtaattcatacatttgatggtactgccccttttgcgccattaattcgtcatggcttcccttttcaatgatgcggcccttttccagcacgagaatctggtctgcgtgtctgatcgtggaaagccgatgggcgataataaatgtcgtgcgcccttcttgaaccacttgcagcgctttttgaatgaccgcttctgtttcggtgtcaatgtgcgccgtcgcctcatccaaaattaaaatggccggatcgaacacaagcgctcttgcaaaagaaatcagctgacgctggcctgaggacagtgtgccgcctttttcggtgacgggctctctgatgcccttcggcaaagattgcagaaggcttgcggcgccgacttggcgaagcgcttcttccgcctgctccagagaaatacgctgatcatcgagtgtcacattggagccgatcgtgcccgagaaaagatacgggtcttgcagcacaatgcccatatgcgacctcagctcctgccttgacatgctgtatatgcttttaccgtccagcaggatatcccctttttgggcatcataaaaacggaacagaagattcaggatggagcttttgccggaccccgtatggccgacgagggcgaccgtctcccctttttcagctgtaaagctgatgtgtttcagcacctcttctccctttcgatatccaaaagaaacatcgcggaattccactgtcccttccgcctttctgtctgcgggagcgccttcttcttccgtttcctcctcctgtaaaagctcgaatactctggcggcagagacacgggccaattcaagcttcgaaaattggttgacaatccccgtaaccggctggaacaaacggtttaaataatcaacaaatgcatataaaacaccgatcgaaacaattccggccgcactcagactcgcgcctccgaaataccagatcagcccgacaaacgccagattgcgcaacacattgacaagactgtgggacatgagggaatttaaggacagcattttgtttttgtagcggaaatgagcttcattcaattcttcaaattccttcatcgtttccttctcgcggcggaacgcctgaataatcggcattccttgaatggactcgttcattttcgcattgatgtcactgttaatggaacggattttttgattgaagacggatgcatatttgcggtacacaaccgaccagatcattaaaatcggaataatcagaaggcaaacggcggccagcctgacgtcaagcataaacagcgccgtaaaaatgccgagcatataaacgccgcttgtgataaatgtcgacagcaccgttacatataaatccctcaccgcttctgtgtcattcgtaatacgggccacgacttttccggcaggcagattatcaaagtagcggatcggcattttctgaatgtgtgaaaatacatcctgcctcatgcgctgtatgatccggttcgctcccatctgcagcagataatgctgaccgtaatgaaaacatacggaaaacatgagcaatcccgcataaatggcggtcaacgtcagcaatccttttatttccggacggtaaaattcaaaaatctcctgtcttgataacgtaatgacgggatatgacctgctttctttaccgtttgatattgtcagccggccgtcagacaccgaacggtttccgtcaaaactgacgggacggtcaacaaaatagtagcccgcaccgacttgataaatgtgcgcctctccggttttatccgcccccggtttgagccggtcctccctgacataatcatgcccccggaacctgacggcgcccggatcgtccgcagaggctttaacccatgttttttcaatgccgagaatgtggtcatcaatcattttttttccgataaacgggccggtcagctcagtgccgaccgcaataatgagcaggacgaccgcccatatcagcagcttcttatattgaagcgcgtaattccataatcttctcccggtcttcatgcgcccgtccccccttcttcaagagaggacagctgctgcctctcatattgttttcgataccagccgttctgcgccaatagctcccggtgcgtgcctctttcagacacccggccttcgtccatgacgagaatgagatctgcgtgttcaactgccgagagccggtgggtggtgataatcgttgttttatgccgccgttttttacggatgctgtcaatgatggcggcttccgttttcgcgtctacggcagaaagcgaatcatctaatatgagaatatcaggatcggtcaaaagcgctctcgcaattgagatgcgctgcttttgtccgcccgagagcgctacgcccttctcgccgacaagcgtctcaagcccgtcggaaagcatgccgatatcgttttcaaaatgcgcatctttcagcgcgccgccgatttcctcttcgtttgcatcctgccgtccgtaaagcagattctcctttacagtcttagaaaataaaatatgatcctgcggcacatagccgatccacccgcggagctcctcaagcgggatctcctgaatcgggacgcctgtaaacgtgacctctcccgcaccgggcggatattcacgcagcagctgcttaatgatcgtcgtctttccgcttcccgtcttcccgacgatgccgagtgtctgccctttttctacggaaaaagatacatcggaaaccgccggtcccgctccgctcggatacgtgaaagtcacttgttcaaaaacaagacgcccgggctccttgatgccggcggggcgcttgggcccgatcacgtcaggctcataggaaagcgtctcattgacacgatccaaggaggcattgccgcgctgcatgatattgattaattctccgatcgcaaacatcggccagatcatcattccgaggtacacgttaaacgataccagctctcccagcgtcagccggttttgaaaaacgagataagcgccgtagccgagacctatgagatagctgaggccgacgagaagtttcacagtcggttcaaaaagtgaatcgataaacgccaccttcatatttttctcatatacatccgccgtcatatcaccgaaccggctgacatcatttttttcctgcacaaatgcccggatgacccggacgccggataccgactccagcaccttgtcatttaatgatccgaaagcatcctgcgcttccgtaaaccgctcatggatcttttttccgtacaggctgaccgcagccgccattatcggcagcggaataatcgcggcaaatgtcagcttccagctgatgagaagccccattgtcaaaaatatcgtcagcatatacatcgtcgaatcaacgagcgttaagaccccgaagcccgtcgtcatactgacggcctgcaggtcatttgtcccccgcgccattaaatcgcccgttctgtatttctcgtaaaacggcggtgacatttgaagaagccttcccatcagctttgaccggagaattttctccatgacattcgccccgccgaaaagctgatacatccaaaaataagacagtaaatagacggctgccgttaatgcgagaaaaacacatatgtaaaacagcatcccgcttttcgtaaacacgcccgccttcatatcgtctatcgcattaccgagaagtttaggcggaaacatctcaatgacattcacaatcaataacagaacaatcgctgtcgtatagcgcagccaataggctttaaaaaaccacgcgagcttttttaatacagtaaacaaataccgtcatcccctttcatcaatcagccgccctcaagcttttccggattgtttttcattgttttcgctaatgccgccacatgcatcacacctgtctttctttcatttttttgtataaaaaaagacatgaagcctcagctccatgcctcttattattataaataaggtacagacccgccgtttatgcgcgactgccccgtttttaagcaaatgttcagaaaacggaagctgtatggaagtcacgccggtattcagctgaagatgagttgacaagctttagttttgacatgatccatacctcctttttcctatattgttccttcatcatataaataaatcctttttttgtcaatgcgggttttacatttctgccgcacgggtattgtaaaacaaaccttttttactgaaaggatgaggctgatgtttcacgcagaccggttgatagcagcttttgacggaagtgatgatagtaaaaaagcgcttcaaaaagccatagacctttcaaaaacgttccacgcggatttaacggtcgtacattcccacagtgcaaaagatacccagacgattgttgatcccccgaggccgggagccggggcaacgtatatcggcggcgggattgcaagcgttcctgacccgcttcaggcggaaagaatctcccctgatccgatgatttatgaagaccgtacggaagaaatcgttgcggaagcgagaatgctgatgaacgacagccagattgacggggatatcgacattttagaaggtgatcccgctgatgccattatcgagcatgccgaccgtatatcggcggatttgatcgtcatggggagccgggaccagaacaggctgaaaaaacttttattcggaagcgtcagtgaaaaactgtcatcgaaatccgatattcccgtgctgatcgtaaaataattctttctgtaaagcagcttaatcaaaagctgctttttttacagctcccggctgttttttctttttttcggcattacaaaaaaactcgccatgatcaaaaaatcgatgcacaatacgacagaccagccctttaacagtccgctgagcgcttcggtgcgggaagcgtcctgaatgagaaataccgttccggctaaaagaacgccgccgatgacaaatgctaatacatgtcttccccatccttttgcataatgtttggcataatccagtccgtaccgcttgaccggttttgccccttcctttaccacataatagcggaaccgctcatccgcccactgaatcatgctttttccgaaggcgacagacactccgatataaacggccgccactgcatgcgccatagtcgccgccgcccctctgtataaatcagctgcggccgccagaaacagtacggcatccaatataggaatgagagcgaaaaaaaacattccgagcttttgccgcctgaatatatagcgcgccgccaatccgaagatgacagccgcccaaaaagcagcctcacaaatgacaatcaaccaagcaatcgcgttcaatccggttcccccttatcgttttctaaaatgcattgtatcactgctttttatttaatacaactgtattacaaaattgcaagaaaaaatatttcctgttacactggaaccatgcctaaaataatcgatcatgaaaaaagaagaaaacaaatagccgaagccacttggcggacgattttggagcggggaatggaaggagcgacagtgagaaacatcgcccaagaagcgggtctttctttaggcgcgctgaggcactatttcaccacccaggatgagcttttagggtatgcgatgacactcgtaaaagaaaaagcggccgccagaattaacgaagttgccatgaaagatctgccgccgaaagaaaaagcggtgcgtctgatgcttgaaattatcccgacagatgaagaaacgatggctgaaatggaggtgtggttcgctttcacagcttatgccagacataagggagaagagtttcaaccccagcaggacgggatcttggcatatatccgcggcctgattgactggctggatgaaaataagcttctgaaaccgaatcttgataaagaaaccgaagcggagaaaatgtacgctatcgccgacggattggcgctgcatgccatgcttgaacctgatcgtctttcaaaagagaagatctcccgtgtactcgttcagcatatcgaatctctttttatctgactggagcaaaaaggccggatgtgttccggcctttttttcagcttatgactgaacgccgagctcctgctgaatgtgcgactgaaaagcctcctgaatcgttttggctacaggtcccggcgatccgcttccgaccggttttccgtcaagggttacgatcgggattaattcagacgtggttgacgagatgaaaatttcatccgcatctctgagttcctcttcggtaagagccttctcccgcacctcaatcccgttttctttcatcagctctaacagtttcatccgcgtaatgccgtttaaaatcagctcatttgcaggatgcgtccggacggtgccgtttatgacggcgtatacattggatgaggttccttccgtgaccgccccgtcccttatcagcacggcttcataagcgcctgcttcataggctttttgttttatcatcacattatacagtaaattcagactcttaatgtcacacctcagccagcgtttgtcttccgccgtgatggcctgcgctccggctttttgttcattttccggttttttcactgaaaaggtgtatgccgtcgtctgcggctccaatccttcgtcatactggtgcttccgcggcgccttccctctcgtcgtctgtatatagaccccgccgtcaatgagtttgttttcctgtacgagcttttgcagatcccattctatgtcctctgcggagaacggcagggtgatgccgatttctgcggcgcttctgaaaagacgggcgatatgctcacgcagaccgaataaggcgccgttatacactctgatgacctcatacacaccgtcaccgaattgatatccgcggtcctcaatatcaactgccgcttcttcacgatcaatcaactggccgtttactaatgtcttcatgtaaaccctcctaatcgttatctgccgtgatgtgcattctcagctgttattgtcaactattctatcatactgaacgagccggctgcggagtttatttttttcttaaaatcttattattcgacatcttttctatgtcttttccagttttgttcctgtatacttgattcgacatacatatgctgttaacttatggcacttcgcaagcctccgctgttatcggcattatgcagaaacttatgctactggagagattgttatgcgcaacacaaaagaaggtgcttccccttctctgttttcattggcttttaaacttacgagtttagcagttttgtgcggactgcttctggtaatcgtcataatgggatattccgcttccgccgcaaaaaacaaacaggtcaccgtgaccgcaaacgggcagcttcgggatgaagcagaaagcctgcggctgaaaaatgattctcccgacgtcttaatgaaacatttgcagaaagagcgtgacccagggaaaaaaacggtatatttaaccttcgacgacgggccgtctccatatactgaacagctgttgaatgtattgaaggcaaatggcgcaaaggccactttttttatgcttgaaccgcggatgaaagcctataagcattccgtgcaaagagcgaagcaggaagggatcgcgctgggcctgcacggcgtgacgcacgataatcacctgttttatcaaacaccgacatcaccgctgaacgaaatgcagcagggacgcgatacgctcgagacaatcactggagtaaaaacggatcttgtccgcacgccttacggcagtaaaccctcattgacggatgcccagattaagaatctcgaaaaagacggattcgtgtactgggactggacgatagacagtgaagactggaagtacaaaaacgcgcggtacgtgccggaagtattgaatcagctcgcatatttggaaagcgttcatacgagcaggccgcatgtcattttaatgcacgatctgcctgcgacggtgcacgctttaccgagcctgatccaaaaactgaaagcccagggctactcctttgatgttctgacggatcaaatgattcccgtccatgaataagaaaagccggatctgtataggatccggctttttttatgtcgcggcgctgatccgttttgcaaattcaccgatcttctcatggatgacaagatcaaataaatggtcgcaatatgtcggctcaaggttaatgatcacttgcttcaaaccgggaatccggcccgcatcctcagggacaaaccttgccggcgccacttcaagcgaagtgccgatcacaagaagaagatcagctttatcaagcttttcataaagggtttcaaaatgctgaacgagatcgccgaacagcacgacatccgtctttaatacggtgccgcataccgcatgatcaccgacttcggccgtacattccggcacttcgtccttcagcagatgagaaagcccgtagcgcgctccgcagcgggggcatgcggcggtctgaattgaaccgtgaagctcatagacactgctgcttcccgctttcttatgcagtccgtcaatgttctgcgtgaaaatgtctacctgctttccccgcttttcaagatccgccaaatacgtatggccggcattcggctcatagcttccgctcattttcatctgaaagagctgtttgaatttaggccagaattcacgcggacggcgttcaaagtattccctgctcatcgcttccattctggaggtgtcttcggtccatataccgcccgccgaacgaaaatcgggaatgccggattccgtgctcattcccgctcccgtcagcaccaggatacgttcagcctgattgatcaatgttataaacgcttccactcttccaccgccttttctttttatcatatcatgaaaaaagaacggcgcctgttatgcccgttctttttctccggaatgatccttcacatgaaccggatcatcgtggctcttctgttttacgaatacattctggcccggataggcgaactccacgccttcctcagcaaaaatatcaataatccggcggttgatatcctgccgcacgtccaggctttccgcccagacgatggtctttgtgtaaaagttgaaaaacagattgtaatagctgtccgcaaacacgtcaaagttaaccataatcgtatcatcatgcacgccttcatgttcacgaagcatttccctgagccttgtgatgcaccgctctaaacgatcaatcggcgtcgcataagaaacacgaacggaaaacgtgacctggcgcttcgtcatcctcgtccagtttgtgatggcttccatggacagcgttgaattgggtacggtaacaagcgccccctgcgccgtgcggaaccttgtgcttcggaatgtgatatcttcaacgccccccgtcacagatgacgtctcgacccagtcgccgatcgtaaacggcttttccgtaatgatgataatgccgccgaaaaaattgctgatcgtatctttagccgcaagcgcgaaggccaagccgccaagtccgagtccggccacgaacccgtttacatcataattgaattcctgcgcgatcacactgacgctgagcgcgagaatgacaaagcgcagcaccttggataaaaacggcgccaaaatgtcatccatatcaagctcaaagcgctgattgactttatgaaataaaaacgaagacgccgatgtcagattgcaaagcccccaggcgatcagcgctatgatcaaagagcggtacatttttttgacaatgtccatctgcccgtctaaaaacggcgaatactcaatcgccaaaaacagacccagcgccacgaaaaaccatctggccggcttgtcaaacgctacggcaatctgtttgaatatgtcggttttcggcttgttcgccaatttgtaaatgagctgaaaaaagtatttgacaaacagttttctcaaaacgagaaaagccgctaaaattccgatgctgatactgatctgcaaaatatggtcaagagtaaaaaagctctgaaattgtgtcatcatggcatatgctcctttgtcttgtcgaaaatctattatactaaaacattcggacatcagcttgttttaatgtctttaggcagcctgaaaaaccccggcctcagagcacagccggggtttttcacacattcgttcatctttcagccagatacaacagggtcaggcactatttcttctttgattgtgtctgtttcaggagagtcgctttttggatttcagcatcggtttcggccttaattctttcttccactttcaatctcccttttcccatgatctcgcctcctttttgccattataaatcatcactgcggattgtaaaccgaaaaaagcactatctttattccaaaaaaatactgttttgcacattcaccagtttgaatcgctgtgcatatacgaatctgatataataacagaaatgcccatgaggggagctgacaagcttgtataccatcgctcatcgcggcgcatccggttacgcgcccgaaaatacatttgcggcatttgatatcgctgccgaaatgaacgctgatttcattgagcttgacgtccagctcacaaaagacggccagattgtcgtcatccatgatgacaaagtcgaccggacgacggacggctccggttttgtaaaagattttacgctgaagaagctgcagtctctggacgccggcagctggtatggggctgagtttaaaggggagcggattcccctgctcgaagaggttctgaagcgttatcattctgaaatcggatttttaattgaactgaaagggcacgtttctcaagtcggtcttgaaaaagcagtcggccagctgttaagcaggtttaccttttccattcaccctatcgttcaatcattcagtctcaagtcgattcagacctttcacgacatgtatccgtccgttccgactgcaattatcgcaagacccagcttcgggatgttttccaaaagccagctggccgcttacaaatcagccgcaaattatgtcaatattaaatatacccgcctgaatcggttcttgatttccaccgctcacaaacacggcctgaaagtatttgcctggacggtcagaaatcacaagacggccgaaaagctgcaaatgatggcagttgacggcattgtaactgattttccggatattatttctaaggatggctgatatgaaacaatacatcgcaatttttatcggaggcgcgcttggcgcattgctccgctttgaaatgagcgcgcacattcacagcggaactttcccgggtgccactttcctcgaaaacgcggcgggaagccttttactcggtcttattacgggttatttcatcattcgggctaaacgccctcttttgaccgcctttttaggaaccggtttttgcggaggtttcacgacgatgtcaaccttcgcaaaagaaaccatttttctgctgcaatcgtctcccgcagcggctttttgttatgctgccgcgactttattcgctggtcttgctcttgcatacgccggcatttttttgggacggcggattgcccttcacgcagccggaagggggcatgatacgccatgacgattgtcctgatgcttatcgcggcgggtatcggagcggtattacggtctctgctgggtaagacaatttcagaaagaacaaaaggttttccgattccgcttggaatggctgcggtcaacctgctcggctccttcagcctcggcatattcaccggcttgggtctggataatccttctgccggcgtcatcatcgcgacgggctttttcggtgcgtttacgaccttttccaccttcagtattgaagccgtgcagctgatgatgaacaaccgcataaaggaaagcctgctctacatcgctgtttcagcagccggaagccttttggcgttctggtgcggctttgttatgatatccatttaaaaaaaccttgagcttatttttcgctcaaggttgcgttatgaagcatgaccgtttccggcacgggcagcgggcggtttattgtcccctgaccgcccgggcggccctgttcttctttgagttcaagctgtttaataaaccggccgtccatttctaatatgagggcagtgtatcccccgatttgtatcgactcacccgcacaaatgtcaatattccgtttcagcacaagaccgccgatcgtgtcgacttcctcttcaatctctgcgccgagaagatgattcacctgatcgatccgaacctttccgtccagcacataatggcgttcggacagcttttgaatctgcggctgttcgtcctcatcaaattcgtctctgatatcgccgacgatttcttcaagtatgtcttcggtcgtcacaagaccggacgttccgccgtattcatcagacaatatcgccaaatgaatccgttctctctgcatttttatcagcaggtcgtgtatcgggatcgtctcgatgacttcaatcaccgggcggacgtaagacatgatggatacttccgctttttcatcttctgtcataaacagcagatctgaaaagagatgcttcgtattgatcatgccgatgacactgtctttgtccccgtccgttacgggccagcgcgtatatttgtctttcagcatcatatcaagcatttccggcacgtccatatcagtggaaacagccgcgatttcttttctcgggatcatgatttccttggcgatccgattatcaaaatcaaaaattttattcacaaatgtatattcagacggattgatttctccgttttttaaactttctgacagcaggatccgcagctcttcttcagagtgggagccttcatgctcagatgccggctttaatccggccaaaccggtcagaattctcgcggagccgttcagcacccaaataaacgggaacatgaacacgtaaaataaccgaagcggtccggcaatccataacgtcagcttttccgctttttgaatcgcaaccgttttaggcgcaagctcaccgacgacgacatgtaaaaacgtaatcagcccgtacgccgcagcaaaagcaatcacatgctcggcagaatccggcagccccataccctgaaacacaggatgaagcatccgctcaaatgcaggctctcccagtacgccgagcccgatggatgtgagtgtaatgccaagctgcgaggcggataaatactcatcaagatccgtaatgatacgctttgcgagcaccgcccgtctgtttccttctgagatgagctgatcgattctggatctcctcactctgacgatcgcaaattcactcgccacgaaaaatgccgttaacgcaatgagcacaccgattaaaatcaaactgtcaatatcgtccatttcaccttatcccgaattgaaggataaggacgtcacctcctgatttcatcgttttttcttaagcgagaggaacgaaatgggtgattgactacacagagggccccatcctgccacctcctaagtcaaagcatgattgtcatttgtatagtttattgtatcacaactccattctttcatcattttcagatttttcatcatataaaaacagccttcaaaaagaaggctgccgttatctgcttcggaaatgattttctaaacaaagcgccgtattaatcccccgaatcccatgcttaagcttaacgcatggtgtacggtatgggcgctcggcccgtcggtcacccactgaaatgaatcgtcaatcggctccgttaagtttcggatcggatgaagcttgttttcccgcatttgcaagagaacagcaatgatttccaccgttccggccgcactcagaccgtgtccggtaatcgattttgtcgcattaatccgcgcgtgcgacaggccgctttcagaaagcgcccggcattcagtcttatctccgatcggcgaaccggtgccgtgcgggttgatgtaatcgatctctttcgctgaaagaccggcccgctccagcgcctggcggatcaccgtcatttcgccctctgctgaaggattcgggttgcggttcgcatcggaagccatcccccagccctttaagccggcccacgatcgtgcgcccctctcttcggcagattcagcgcgctccagcacaatcgccccgcacgcctctccgaatataaacccgtccgtatgccggtcaaacgggcggcaggcggcttcaggccgttcagcgtatgtatcagtgcccatcgctcccaaagaacggagagcgtgacactccatgtacgacagatcggccagcgccccgatcacgatgcaccggtcaaacaggcctcctttaattccttgagcagcctggataaccgccgcctggccgcttgccgacgcgccgccgaccgtaaaggccggcccttttatcccgaattgctccgtgcaaagccccgacaaatcactatccataaaagaaagcccgtatgtcggatttacaaattgcggcgtttcaccgtttttctcaaaggcctgcagcaattcgcgctgcgtcatattcgacccgccgatgatcagaccggtgcggctgtgatcagcgccgtctaattgagcgtcatgccacgcttcatataaagcgataagcgccgtctttcctgataatgcggcccttcggtacaagcgcttcgacagcgcgtccggcggcgttaattcgctaagctccgcgccgataaacgaactgcctttctgccggccgggacgtttcatcacatcaaaggcgtgccgcccctccatgagcgcatcgagaaacgcctccttgccttgtccgaccgcggttaagactccgattcctgtaatgctgatgtctgatgtgccattatttctcctcgacatttgtccgttctcccatctttatgtgttggaagctatgaagaaaaatcttgatacagtgctttgaaaatatcgcgcgactgtctgatctgttccgaaggcacgctgaaagataatcggaaatagccgctttttccaaatccgctgccgggtacgatcaatagtctgtatttctgtgcggcatgcatacagaacgccacctcgtcttcaatcggtgatttcggaaagacgaaaaagcctcctttcggcatttcaaattcgaagccggcttctgtgaggatgtccaccataaggtctctccgctttctgtaaggttcagcgtcaatcgaaagatcatccattttcgccacggcgcgctgcatcatgaccggagcgttcacaaagccgagcgtccggttgcagaaaacgaacgcatccgtcagaagatcgccctcaggcatttgggcgtccgccgcgatatacccgagcctttcccccgcaatgccgagatctttactgaacgaactgactaaaatcacgcggtgatacgcctgaaacggattcgcctgctcttctccgtagatcagctggctgtacggttcatcaaataaaataaatatgctttggccgttccgctcttcggcttcttttaataaggcgcctaattcgttaaggtttttctggctgagcacagtccccgtcggattatgcggcgtattaacgatcagtcctttcgtacggggtgtgatcgcacctttaaccgcttcaatatcaatctcaaatgagtcagtcagcgggcagatgacgggtctgccgcggtaattttcaacatacgctttatattccgcaaaataaggcgaaagaaggatgacttcttcctccgggtttaaaatgctcttcagcgcgacattcagcgccccgccggctccgaccgtcataactgtatgcctggcggaaatctcggtctgaaaccgctctgacaaaaagcgggcaaccttttctctcgcctccggaagcccttggttttgtatgtatccgtgccgccctgtttcagccgcttcgcaaagcgcctttttaaacgtttcaggcggctccgcaaccggatttcctattgaaaagtcaaacaccttatcggcgccgaactcttttttcagccgagcgccttcatcaaatagtttgcgtatccatgaacctttctccaggttctgtgtcacttcccttgataaaccggccactgtcatctgtcccttctgtctttttctgccgtttctatttacaatgattatgaaagatttacatggcgcagtcaacgctttttcagacagcctgccgccccgtttcaggagaaagacggaaaacaataaacttgtgcaaactccccttcatatattaaactattctcataactataacgtgatggttggggagggatttagatggggctgagacttatcgcatcagtgaattagcagagcttgccggtgtaacgaaacgcacggtggattactacacaaacctcgggcttttaaagcctgacaggtcttgttcgaactatcgttactacgatacacttgcacttaatcggttaaagtttatagtcgcttgtaaaaagcagcgattggccctgtctgatataaaagatcgactggagaaccagtttccctcttcagccctgcctgacgatgttggaaatctggcatcggaaattgatcacatgaatcaaaacatctccgggatcttgaatcggtttgaaaagcttgaaccagaggagcgcgcccagctgaaaaaaaggctggctcctgaaaagcttgcagtgcttcaatcatttatgctgctgttaagttaaaccattatcttactaacaggaggtgttaccttcatcttcccaaaaggagtgaaggttctaattggacattgtgaatttgattttagtcgcggttttaatcgcgctgacggcatttttcgtagcatctgagtttgcgataatcagaatcagaggctcacgggttgaccagcttatagcagaaggaaataaagccgcaatcggtgtcaaaaaagtgaccacgcatttagatgagtatttatcggcgtgccagctcggcataacattgacttccatcggtcttggtgtcttaggcgaatcaacgattgaacgcttgcttcacccgcttttcacaaagataaacgtaccaagctcattatcgcatattatttcatttattctcgcctacgcgatcattacattcttacacgtggtcgtgggagaattggcgccgaaaacagtcgccatccagaaagcggaagccgtttcaatgctgttttcgaaaccgctcatttggttttaccgcatcatgttcccgtttatctggcttctgaacaactccgcccgtcttttaacgaagacgttcggtctggagacggtgtctgaaaatgagcttgcccactctgaagaagagctgcgcatcattttatcggaaagctataaaagcggtgaaatcaaccagtctgaatttaaatatgtgaacaaaatctttgaatttgacgacagacttgcaaaagaaatcatgattccgcgtacggaaatcgtcagtctgccgcatgatatcaaaatttctgaaatgatggatatcattcagattgaaaaatatacccggtaccctgtcgaagagggtgacaaagataatattatcggcgttattaacattaaagaagtgctgaccgcctgcatcagcggcgaagtatcagtcgactcgccgattacggattttgtcaatccgatcatccatgtgattgagtcggcaccgattcacgatctgcttgtaaaaatgcagaaggaacgggttcatatggcgattctgtcggatgaatacggcggaaccgcggggcttgtcaccgttgaagacattattgaagaaatcgtcggggaaatccgtgatgaatttgatatcgatgaaatcaatgaaatccgcaaactcggcgacggccattacatgcttgacggcaaggtcctgattgatcaagtgaacgaactcctcggcatccatttggaaaatgacgaggtcgacaccatcggcggctggttccttacccagaaatacgacgtcgaacaatacgactcgattatcgaagaaggctgcgaatttatcattaatgaaattgacggccaccacgtcgcatatatcgaagtgaaaaaactggcgtttgatgaactgctggaaactgccgaacaaaaagaagcataacaaaaaagcttgcgcgtctgatacagacggcaagctttttttcatttacagttgttcaagttttttctcaagctctttaattctggcattcagctcttctgtcatggccgcaagcctctccttcggcgcaagatcggaaaagtcctccaaaaaaatcggctcgccgatgataagccgcatttttccctttttaaacagcgcttttcccgtagacggccctttatatgcggccggaacgagcggcgctttccccatttgggcgatggtcacggcccctcttttcagcgggacgtcttcagaagttctcgtgccgctcggaaaaatccctacaatcttcccttccttcagaagcttaatcggcgttttaatgctgctcggacccggattttcacgatcaaccggaaacgcgtgaatcttctttaaaaaacttccgatccactttttctgaaacagctcttttttcgccatataatgaatctgatggggcaatatcccgacaccgagcgtgaggacgtccacccagcccgcatgcgtgcacgcgataacgaatcctttatcagacggaagattctctttattgtatactttgactcctccgcgcagagaaagaatgaatttgatggcatttgcacaaaacttatacataacgcacttcctttgttgtaatgatcaaaagtgttctctctctattataacaatattttttattacctggtactaataaatatatttttcctccgccgatctctatcttttatgacggattttgggtactatagagaaatggtgtttgatgaggtgaaaatgaatttaagccgtttgcatggaacgtgcaactttaaacctttcttatgcgtgtataacatagaggggagaaaaggcagtgacgatcgatgaaatttaccaaatgtatatgaatgatgtttaccggttcctgctctccatgacaaaagacaagcatctcgctgaagatttgctgcaggaaacctttatgagggcatacatacacattcactcctacgaccacagcaaagtaaagccatggctttttcaagtggcgagaaatgcgtttatagattatgtcagaaaacataaaaaggaagtgaccatttccgatgacttaattgggagcctttttcagacggctgttcaaagcccggctcatcagattgaaatcaaggaagtgctgacagggtatatgtccgaacttcccgacaattatcgggaggccttaacactgtattatttaaaagaactgaattacaaagaagcatcccatattatgaatatttcagaggctaattttaaaagtgttttatttcgtgccagacagcggctgaaagcactttataatagaggtgttaatgatgaatgaagaatttaaaaagcgtttttaccaatacaaaaatggagaaatgagcgaccgggaaatggccgcctttgaagaagagctggaaaagcttgaagtctatcaggagttgattgaaagcgaaatgcaggacgaccgggaatgggacgtcggcatcagcccggaaaaacagaaggccattttgtcatacggaaaacgcaaatcgtatttgcggatttcagttctcgccgtcatctccaccttgatgattttgccgctttgcactttgggaagctacctctattacggtttgggaggaaaagaaagcaccggcaatcaattaatggaaaccgcagccgtgacggtggcgaccaccatgccgaacgtactcgtcgatacctccggactgaaaagccaggtgaagctgtttgggatgaatacagagtttccgctgcaaaagcagatcggcacaaaaacgaaatccgtcggcggagaacggattgaaatgtttttagatacggtcaaatcgcctgccgttaactactatgatctagacgcggcacaggcaaagcattattttgcccatccttccggcttaaaggaacgcacgattgacaaagccggacagacattaaaaaaattgcctgaaggaagcgtggcggaggtctatctttcttatgaccgggcctatccttcttctcaagtatattctacttttaaaaaatacgatgtgaagtttttatggaacgcggtcgaaacggagaaaaatctgaaagacagtccttatgccgagccgttaggatttcccgggaaagattccaagatggtgtcctctttcgaaacgcaaggacagacagaccgtgaacaatttatcaatgcccttgaatttatgtcccgccataaaaaatgggcgcatgcaatatcgaaacgcaaagacatgaatcttggcagccgaatcgactatgttgaacatcacggaatgaacgtatacggctctgtcgtgacggggccgacaaaagaaatcgaacgtctgctgaaaaataaaacagtaaaagcagcaaacatcggtgaggtggaattatggaattggtaagaatttttaaagagcataatgttttcggctggatatcagtcggtaccgcgattttgtcgctgctgcttttgaacgtggcaatcatcagcaatgtgactttctattcttatcagatgctgccgtttgcgatggccgccgtgccgttcggcatcattgagctgtttattaaaaaaggacggacgggcccgggactgctcggtgtcatcctcaaccttttcgtcattgtttgtgtatatacgatcgttgccgttgatacgaatctgcaattcggtttttaaacataaaaacaggcccttttacaggggcctgtttttttaaaatgaaagaacgccgattaaatgcagcaatacgacgatgatagccagcggcacgaggtatttcagaaggaaataccacacctgaaagaaacgatagccgatggcggaaccgcttttcatctcggcgaacagctcccgcttcggtattttcagcgggatgaagattgatattaataaagcgccgagcggaatcagcacattgctcactgtgaaatccgctagatcaaaaaacgtttttccgaacaaatgaacatcaccgagcacaccgtatgataaacacgacggaattccgactaagaaaatgagcagaccgcttgtccacgacagcttcttccttttcgtttcatcacctttcccgacagtcgctacgataatttccaccatcgaaaaggccgaagtcagcgcggcaaagaaaaagaccgccagaaagctgataaaaaacagcgagccgaacggcagccggtcaaacacagccggcagtacggtaaacagcagtgtaggcccttcatccggtttaaatccgaacgaaaaaaccgccggaaaaatggccagtcccgcaaacagcgtgacgagcacattcatcacaacaatggaacccgccgatcccggaaggttttgggttttcggcagatacgaactgtatgtcaccatgaccgaaacgccgagcgttaatgtaaagaacgcctgtcctaaagcatataggatggattccggcgtcaaatcttcaaagtgcggaaccaataaaaatctaatcccctcaacggcatgatcgagcgtgactgatcgcagcaccagcaatagaaacagcacgaataaaaccggcatcagcaccgcactgacacgttcaatccctttctgcacgccttttgcgacgaccgccactgtcaagatcataaatacaagctgcgcggcgagagtctggatcggattttcaatgaccgtcccgaacaccgttccgtactgctcctgagtgagcccggataaagaacccgtaacagcttttaacacataaagcaaaatccacccgccgacaacactgtaaaaagacaaaactaaaaaacaggccgccacacccacataacccgtgaggtgccataccgacttcggcgcggcttgtttgtaggcatcaatcgcatttgtctggctccgtcttccgaaaataaattcaccgagcaaaagcggatagcctaaaagcacggtaaagaggacgaatacaagaaaaaaagcgcctcctccgttcgtacccgctacgtaagggaacttccaaatggctcccaggccgatcgccgaaccggcagcggccataataaatcctatttttgaggcccattgaacccttttttggtcagacacgactttccacttcccttccgccctatattatcccttattcactgcgataacttaagcccatttcaatatgtttcattattccgaaaaataaaaaggagcggcgggtgccgctccttacaaatccccgtttaatttcgaatgctttctcgaatataagaaataaatcaccagaccgatgatcagccagataaagaaacggaatatggtggtggcgccaaggttaataatcaaaaatacgcagaacagaatggacaatatcggaataaagggaacccccggacatttaaaagctctcggcagatcaggctgtttctttctcaatacgataaccgccactgaaatcaggacaaacgcggcaagcgtgccgatgttcaccagcttcgccagctcatcaagcgggacgagcgagccgagtaatgccgacaggatgccgaacacccatgtcaccacgtgcggcgttttatgcttcggatggacttttgaaagcgcccccggcaccaaaccgtcacgggacatggcaaacatcaccctcgtctggccgtacagcatgacgagcatcaccgttgtcattcccaacactgcaccgatatcaataatcccggccacccaattctgtccggccatctgcaggacgagagacacgggatggtcaacgccttcaaagcgggcaaacggaacgacgcccgtcataatcgccgatacggtcacatacagcacggtgcagacgattaatgaaaagataattcctttcggcagatccttcgccggatttttcgtttcttcagcggcggaagagacggcgtcaaaaccgataaaagagaagaaaacgagcgccgcggcactgaaaacaccgccgaaccccatcggtataaacggctgccagttgtgaggtttgacatatacggccgcaacggcgataaacaatagaacaaccagaaccttcaaaatgaccataatattattgacccgcttcgattccttaatgcctaagtagaggaggaatgtaatcgcaagcacgataacaaatgcggggagattaaagaatgtgaccgtgcctttaatggatcccggcgcggccgttaatgcggtcggaagatgaatgccgaagcccgccaagaatgattgaaaatagccggaccagccgaccgaaaccgcgctgacggcgagcatatattccaagattaaatcccatccgatgataaatgcgagaagttcacccagtgtcgcataagtaaacgtgtagacggaaccggaaaccgggacgcttgaagcaaattcggcatatgacaaagccgcaaataaacacgcaagagcggcgatgacaaatgaaacggtcagccccggccccgccgtgacagcgcctgttccggttaatacaaaaattcccgttccgatgatggcccctatccccagaagtgtcaaatcaaaggcccctaactctcttttcagcgacttttccccgcccgttgcggcaagcaggtcctgaatgcttttctttctgaatatgctccccttcatctgcttcactccttgtaaatcaatatatgttagaatattcagacaacaatagcaataatgactaaattcttatttttcgcatgaaatgtttcagcacatcattcctttctcctacaccatattatagcgaaaaatataaaaatgaaaataacttttttgaaaattctatatattatttcagttttcataaaacagaactcagcggattctccgctgttaaatattaacattagtaattcagctggcggcttctattttttaaaaatcgtattcatatgtaatcaaataaaaatcccgccctttttaaaagcgcgggataagacttgcttattatgttgaaataaacctgcctccatttacgtgaatggtctgcccagtcatataggaagattcgtctgaagccagaagcacataagctcctgcgtgttccgcaggctgtcctggtcttcccatcggagtgtccagaccgtgcttttccaccttttcttcagtaaacgttgccggaatcagggcggtccagatcggcccgggtgccaccgcatttactctgatcccctgatcggccaatgacatcgccattgaacgcgtaaaggaaacgatgccgcctttcgtgcacgaatagtcgatcaatgatgtgtctccctgataagcggtaatcgacgttgtattaatgatggcgctccctcttttgagatgaggcagcacggcttttgtcatatgaaacatggaaaacatgtttgtacggaatgtcttctccagctgttcagccgtaatatcaagaatcccgttttgcggatgctgctcagccgcattattaacgagaatatctatttttccgtagtgatctaagacttgctggaccgccttctgacaatgcgcctcatcaccgacgtctcccggaattaacaggcaatcggcctggtattctctcgcacgctttttcgttctctcggcatcggcatgttcgtctaggtacaggatggcaagatccgccccttccttcgcgtaagcgatcgcagccgctgcgccgatgccgctgtctccgcccgtaataacggcgacttttccttttaatctgcccgacccttttacatccggatcctccaagagcggttttggctccatgtctgactcaatgccgggctggcggttttgcacctgcggcttttgtccttccgtctgtctgtccatcggattcatattctcacactcctgcaattggtattactgagacgataccacgcagtgcggggagttaaacggacaaatatgccggtaattaaagctgctgagccgtttcgggaaaagcgccggtgtatttcgcagacggtctgtaaatcatgttgtcagcggactgttcaagcacatgtgcgcaccagcctgccattctgcttgctgaaaaggtcggcgtaaataaatcattgtcgacatcaatggcctgcatcacagccgctgcgtaaaactccacattcgtatacagcttccgtccgggcttatattgctctaacaagcggatggcttccttctccacataaagcgccaagtcaagcgacggatcatttcccgccacttcttcagcctttatgcgcagcgcttccgcccgcgggtctttcgttttgtacaccctgtgcccgaagcccatcaggcgttctcccctcataagcttcgctgtcaaatacgcttctgcattttctttttccccgatgtcttcaagcattttcgtgacgcctgaaggcgcgcctccgtgcagcggccctttcatcgtacccagtgcggcagtgacggcagacactaagtccgattcagtcgaaaccgtgactctcgctgaaaaagtcgatgcattcatcccgtgttccatcgccagaatcatatacgtctcaagcgctttcttttgggctgcggacggctgcctgcctgtcagcatatacaaatagttttcaacgtgtccgtatcgcgcctcgggtgacagcgcttcctgcccttgtttacggcggtatctgtacgcaataatcgtcggtgtgacggcaatcagtttaatcgcttcttccggcttgggcggatatgtaaatgaatctgtgcccaaacctgaaacagccgttctcagcaccgccatgtcgtccatttcatccggaagcgtttccagtaagccgatcaaatgtttcggaagcccgcgctcggctgcaagttcttcctgaaacgcaagcaattgccgctcatcaggaagcgccccgttcaaaatgagatacgccgcttcttcaaaactgaattgcaatgcgatatccttcgcgtcatagccgcgatatattaaatgccccttttctccgtcaatgtggctgatcgccgtttctgcacaagtaatccctttcaatccacgataaatcaatttcattcccccttatcctctttctgttattatagtaaatataatatttaaaaaataatgaatatttttaagggaattaattaaaacttttaatcagaggagtgcatctatggattttaaatggcttcacaccttcgtcaccgcggcaaaatacgagaatttcagaaaaacggcggaaacgctttttttatctcagccgaccgtcaccgttcatataaaattattagagaaagaaatcagctgcaagctgtttcagcggagcggccggaaaatacaattgacggaagaaggaaaagcatacgtgccgtttgccatgagacttttggaagactatgaaaacagcatggcggagctgcacagggtgcgccagggctactcgcacacgctgacactcgctgtttcgccgcttatcgccgacaccgttctcccgtctgtcatgaagcgttatacagaggacaataaagaaaccgaaatgacggtcaccattttcgaatcggaagaaatcgcctctcaaatcagaaacggctcagccgatatcggactgagctgcttaaaggtgcaatcatcttccctcacttgcctccccctgtacaatgaccccgttgtcctcgtcgcgccacccggccgaaaacccgggacagggaaggcggatgaagtgaaagacctgttcggacaatatctgcttttgacccataaccatcctgactattgggatgatttgctccgccaggtcagaatacagttccctttcgtcaggacaatgaaggtgacacagacgcatattacgaaacgatttattaaagaggggctgggcgtctcatttctgccgctgtcagcggtacggtccgaactcgccgcaggcagcatgattgaaattccgtgcgaattcgcccagatgccgagcgcgggcgcgtacgccatcgccctctatgaaaatgaaaaaaagaaaacctttttagattttttatcacattttcatttttaggtgaaacaaatggagctctgccccgtctaaataaaaaacccgttcggatgaacgggtttctctcactgctagaatcttttcgcgcccaggtagcgcggtttccagtagctgttattcagatcacttgttgtgacgccgtcagaaccggcatggatgaacttgttgtttccgatgtatacacccatgtgtgaaggaccggcttgatatgttgtaaagaagacgaagtctcctcttgacgggctggatacgctcttcattgagctccagtatcccgcagtgcttgttctgccgacactcgtctgtttgtttaacaggtaccagataaatccgctgcagtcaaagccggaagtcgttgttccgccccatacatacggcgtgccgattaaagattgcgcatcagaaaccagcttgtttacattcaggctcgtctgtgcaatattatggctggatgaaggcttctttgatgacgaagatcctgaagacgctgaaccggaagttgatccttttactttaagcacttgtccgatgcggatcaggtccgtttttaaaccgtttaaactttttaattggtttaccgtcattttatatttattcgcaattttccaaaggctgtcgccttttacgactttatatgtagacgatgatgacttgctgcccgaatttgaacctgaagatgatttaccgttgatcgaaagcgtctgaccgatgtaaatgatatccgattttaatttgttctcagatttaatggaattaattgacgttccataccgatttgaaagtccccataatgtatcgcctttttttaccttaatcgtttgcgcagacgccgcgcccgcaaacaaagtcgtccccaaaaccactgccgttgttgctgtaacaagttgctttttcatattttcctccctgaatgattctatctattttatgtgtctcttttttaaagtttttatctgtttcctattataaggttcaatttccactagaaatagacttgacttcccgtgacaaatttcttactaattcgtttttgaaaaaagtttttaagggtattaaatatttcaatttgatttcaaacgtgacgaaaaacgagtcaatttgtcatgtttttttcctgtgatcctcgtattttggaaaaacaaagcagtttactttccaaataactccttgttaaaaaaatcctcgtctttttcaaaaaagtgaatggttttcactctttcttgaaaacataagttacaccggaatttacatttctaacaatgtttcacctgaaatttacaggaggaacaggcgctctttacaaacaccccctaccattagacatgcagacacgattaaaggaggacgagtgagaatgagtctatttaaacaggttcgatcaaaacttctgccggcggcagccgtatccgtgctgacagccggtctgattgcgggcgcggggtttcagcactctgaacaggctgcggcaaaaaaacagcctgacaaaaacgagatcagaaacgtcatcttcatggtcggcgacggaatgggcgcaccctatatgaacgcctaccgttcggtcattaacaaaggaaagccttcggatggtatgaaactgacggcattcgaccccaatctcgccggtatgatgatgacttatcctgacgatcctgattccaatattaccgattccgcggcggctggcacggcaatggccacgggcgtgaaaacgtataacgcggcgatcggagtcgataaaaaaggaaagcgggtcaaatccgtcctcgaagaagcgaaacaaagagggaaatccaccggacttgtcgcaacttcggagattgcccacgccacccctgcggcattcggagcccataacaaatcccgaaagaacatggatgagatcgcaagcagctactttgatgaccgcatcaacggaaaacaaaaagtcgatgtgctcctcggaggcggcaaatcaaactttatccgtaaagaccgcaatgtaacaaaggatttcaaaaaagcgggatacagctacgtgacatcaaaacaggagctgaaaaaggaccgtaacaagaagattctcggcctgtttgccgatggcggactcgacaaagcaatcgaccggtcaaacgctgtcccttcattagaagacatgacaacggcggcgatcgacaggctgaacaaaaataaaaaagggttcttcttaatggtcgaaggaagccaaatagactgggcgggacatgacaatgatatagtcggcgcaatgagtgaaatgaaggattttgaaaaagcgtataaagcagcgatcgcatttgccaaaaaggacaaacatacgcttgtcgttgccacggctgatcataccaccggcggattgacgatcggcgcgaatgacgataaaaactggcatgttgaaccgattcttgccgccaaaaaaaccccggcatttatggctgaccaaatcaaagcgggcaaatccgtatcttccgtgcttgcgcgttatacagacctgaaatggtcaaaagcggaaattaaacagatcgaaacggccgcaaaacaggatgctgacaagagcgtctacaaagcgatcattaagctttttaatgcgaaaacaaacagcggctggacaaccggcgatcatacgggcgaagaagttcccgtttacgcatacggtccgggaagagagtcatttacggggcttttaaacaacacggaccaggccaaaaagatctttcacatcctgaaacacggaaaataaaaaaggatgcggggatttccccgcatcctttcttcttttacaaatatctccggtgcactcctttgccgtcatacgaaaacatcacttctctgtcttcaagaacagattcgatgtgcacgctcctgccccacagctggtacagatacggcagcactttctccaaatatttcagatcaagctcaattccctcataccaatgtttaatataaagctcattattcttcaggtaatccccgtcattgacggtcagataaggaaatcccccgttgacccgcatgttcacgagctggtcgcgcacggccttccattctttgtcgatcactttatagtccctgccctgcttttggaataaatacaaatcctcacgcataacgagatctttcgtcaaataattgcggataaatgatatgtccgattcaatttccctgacctcaaacattttctcgcggccggaaccgggctttacccctgtttttttcatttcatctgtcgggttgtcataacgctcttcgatgtcttcaaaaattttcagccctaaataatacgggttgattcccgtttttgacggctgaacgacgcctgcgttcagcttcgcaaattcgatggcttcatctgaagtcaggtcaagctcgcggataatccgctgatgccaataggatgcccagccttcgttcatgattttcgtttccagctgaggccagaaatacagcatttcttctctcatcatggttaaaatgtcacgctgccacggttcaagctcccgcgaatgttcctcgataaacagcagaatatctttttccggacggggcggaaacggttttttccctcttttctttttcacctgtttcggcttatccattccccataaatcatcgtaaggcgatggcgcggtttcttcttcgtcctcctcttcgtcatcgacgctccacagcagcttcggcctgacgagcgacggatcgatatgctcctgaatcgccagaatggcatctaaaaaggactccacctcttttatcccgtgaattctttcataatgcttaatccgctccgccgcagccgccatactctcaaccatgtcccggttcgtattttgaaagcggcagttatttttgaaaaaatcacaatgggcaagaacatgggctacaattaatttattttggatcagcgaattgctgtccagcaaaaaagcgtagcaagggttggaattaatgacaagttcataaattttgctcaaaccgagatcataatggagtttcatcttatgaaattgtttgccgaaactccagtggctgaatctcgtcggcatgccgtacgcgccgaatgtataaataatttcagccgggcaaatttcatatctcatcgggtagaaatcaaggccgaaaccctttgcaatgtcggttatttcctcaattgcccgctgtaaaccttttgtctcctccgcgttcaagcgaatcccccctacttggacttatttataatgtatgacccctcctctcaaaagatgaaataacagaccggtttccgactgaaaactttcggcacatccgccctgtttgctttatatgtaagtgggtaaaacacacaccataccccaaaaagaaaaggagcgattctacttgaatacagcagacatgcttacgacgtatctcagcaaactcccgaatctgatcattgcactgctcgtcctgcttatcggctggggcattgccaaaatcattgaaaaagccgtatacaaaggcctgcaaaaaacaaaaatcgacgacaggctgttcgccgaaaaaaagccggcgcgctattcctcagaaaaagtcatcagtaaagtcatttattttatcgcattaatcatcgtttttattctattctttaacattctgcatctgacaaccgtggcttcgccttttgtcagcatgctgtcggcgataacggcggctgtgccgagcgttttaaaagccggcttgattctgctcgtgggctgggcggccgcttcgcttttcagctatctcgtcaaaaaagcgggcatgaaactcgctgaaaacggccggctcagaaaatggacaatggtgtctgaagaagcggagatgagcagatccgttacggccgcttcacgaatcgttttttacttcgtcttgctcttgttcctgcccggcgtcttgtccgctctccagatcagcggagtgtcagggccgtttacaaatatgattcaaagcgttttgtcctttataccgaaattattcgccgcggcgctgattgttttaatcggctggcttgttgcccgtctcgtccgtgatatcgtcacaaactttctggcgagtatcggaacggaaaggctcgccgcacgtatggggctttctatttatctgaaggatacgagcctgtcggcaatcatcggaacgattgtctacgtgctgattttcattccggtgatcatctctgcgcttgaccggcttgatgtggcgggtatttctgaaccggcgtcagccatgctgcacacggtcttcacaatgctccctaatatcatcatcggtattgtgctgatcatcgccggcatctgggtcggaaaatgggtcagcagcattgtatccgggctcctgcaccgggccggtttcgactctcttctcggtaaaatgggctttgaacaggcgggcaccccgaagctgacgctttctcagacggtcggcatgattgttcagatcatcatcgtcctgctctttacggcagaggcgctgcagcttgttcatctcgaatttctcgtcgttatcgcaaccggtattatcgcttacctgcctaatgttctggccgctgtatttattctcggaatcggacttttggccggacagcttgtcagcaggctgcttgccggcatgctgagcggaaaggaattcagattcctggcgccgcttgcgaaatataccattatcactctctcaatctttatggcgctggatcagctcggtgtcgccgacacgatcgtaaatgccgcgtttattctgattctgggcggtttcgcgcttgccttcggactttcattcggtcttggcggaaaagaatttgcctcccgttatctcgcaaaattggatcgcaaaattgaaaaacatcaatcggctgacgatcgtaagccgccgatgtcttaacgaaaaaaacgtgtgctcagaaggagcgcacgttttttttgagttaagggggcaaattccttttttttcattttagattcatatatgatagactgtaacagaagcaaaatctcttttttcgaggtcattctatgaaattaacgaactataccgattactctttacgcgttttgatttttttggcttccagacattccgacgaactttccaacataaaagaaatcgcagatacttattccatctctaaaaaccacctcatgaaagtcatttaccgtctcggccagctcggatatgtcgaaacgatccggggccggggaggcggaattcgattaggaatgacaccggaagacataaacattggagaagtcgttcgacatacagaagacgactttaacatcgtagaatgctttgactccaaaaaaaatctctgtatcatatctcccgcctgcaacttaaagaaccttctgaatgaagccctgcaagcttacctggccgttttagacaaatatacgttaagggatctggtcaaaaacaaagaggagattatgagactgctcagaagctgaaggaatgtccgcattccttctttttttatgccggcataagaaaaaaggactatttctattaatatgataaacgattgcagacaagtgccgatataaagattatcattactgatatcctcaccttgcggctgcaacgaatggggatagaaaaattatcgcaggaaaagggagattcactatgaaaaaaaaggtagcggtcggtttgactgcatctgcgatcgtcgggtctgcgttagctgtaacaccggcagaagcacaaacgattaaggtcaaaagcggagattcattatggaagcttgcccaaaactacaatacaagcgtggatgccattacatcagcgaatcatctaaaatccaccgttctttctatcgggcagacgctcaacattcctaacggcaaatcagattccggcagcaaaaagccatcttcaaagaacagcggcacgactaaaagcgtctatacagtgaaaagcggagactcgctgtggctgatcgcatctgattttaaaatgtccgtacaggaactgaaaaaattgaacggtctgacaagcgacttaatccgcgccggacagaagctgcaagtgacggggaaagtttcctcaagcaccgatcagaaaaaaaccgctcctggcagcagctcaaacagcagcaaaaagcagtcatcatcttccgggacctataaagtaaaactcggcgattcactatggaaaatcgcaaacagcgtcaatatgaccattgcggaactcaaagtattaaacaacttaaaaacggatacgatctacgtaaaccaagtcctgaaaacaaaaggaacgtcttcttcgggaaacacgccgtcaaaagacaattcaaaccaaaatcaaaaccagacgcaaacgtcctcctatacagtaaaaagcggagactcactctggaaaatcgcaaacgcatacaatatgacggttcagcaaatcagaagcatcaacaaactgacgtcagacatgctgcgggtcggacaagtgctgaagctgaccaaaacgtcttcttccggctcttcgtcttcaccgtcagctccgaaccagtccggaaatacagggaaaaccactacatataccgtgaaaagcggggattctttatgggtgatcgcccaaaagttcaatgtgacagcccagcagatccgcgagaaaaacaatctgaaaacagatgttcttcaaatcggacagaaactgacgattaccgggcagcagacaaacacgacaccgaatcagtccggcagcacaggcggcacaggttcaacaagcgcgaagattaatgtaatgatcgatgccgcaaaagctcagctgggcgtaccgtatgtatggggcggaacgacgccgagaggctttgactgcagcggtttcatttattacgttctcaataaggtcacttctgtatccagactttcagccgcaggctactggaatacaatgacatcagtcagccagccggcggtcggtgactttgtctttttctcaacttataaagccggaccttcccacgtcggtatttatctcgggaacggccagtttattaatgccaacgattcgggagtcgttatttccagcatgaacaattcctattggaaacagcgctacctcggcgcaaaacgtttcttctgatacctgataagctgtacggccgcataaggctgtgcagcttttttacagtctgaaaatattgatgctgatcacgtgttttgttacgggatggaaatacacttcagcacgggatgaaaacgtttcttttgcggtttgcaccgttacgcgaaacacgtctttcgtctgttcccggttcacttttgtacggcccatgtacgaataatcggtaagctcggcccccttgtattcacgttcaagctggttccatgcgagctgttcccatttttcaactgacggatcgaggtgttctgtatgccctttttcagcgatagaggcaatgagaatgccgcaaaacaagagggcaagcgcaaatggaagggatttcatctttatgttctcctgagtcgttttttgtcaatcttagcgtgtccaaagaagagacggatatgcggttttattttatgtctccctcatattgctatgccgcagtgataaggacaccaagttttcccccgttgcatccgggcttcggcggcataaactaacggagaacttctcattgaaaggagaagcgtaagatggatcatgccgattatgataaagccttgtattacacacaccggtctcaatgggacaatttattaattttgatggttcgtacaaaagatgatttattatcaaagcgtattgagcactttctacacgcgtatcatttcgaatatgatcatgccgtgcttgaaaaagagctgtattcccttctcgggtatattgatcatgcgacagagctcgcttatgaagatcaattagccatgctgacataaaacaatcccggcgtcagacgccgggatttcttgtgtttgtgaacatattcagctcttcgatcatgtctttcaggctgaccgccatatcctcagatacggtccggcgctccatgtcgatgtgaatcgggtctaagaccagctgtttcgggatgacatttgcatagacgccccgcatgaccgtccgcatattcgccagcgcattcatgcctccttttcctccgcccgccgcggcaatgacggccaccggtttgtatgcccagtgatcgctgcttaaaaaatcgatggcgttttttaaagcgccgctcatgccgctgtgatactcgggagataataagacgacggccgctgactttttcacctgccgccttaacttttgcactgaaggcagctcgttctgttcttcttcaccgttataaagcggcagttcactttcgctcaaatcaataaaatcggtatgaaaccgatctctgatataagaagcggcaattctcgtccgcccgttttttctcggtgtgccgctgatcactaatatgctcatgattttaccgcctttcccaaaacattatattttaccgcatacaatgccgcctgcgtccgatcggaaagattcagctttgacagcaggttggacacgtgggtcttcactgttttttctgaaataaacagggccgccgcaatttccttattgctttttcctttggctatttcttgaagaacatctttttcacgggggatcagctgataatatttttccttatcctgatcatcctgaaccatatgggtcagcacgtgaggcacaatatccgaacttccggccgccgtcctcaagcggtacggtcgcatgatgggtaatgccctccgtatcgcggcagttcgtcgtctgttccgcaaattcaatccgtttgcaattcattatgtttacggcctttgtcaatccgccattgctgaatttggtcagacaatagcattccccgctgcacatgagtgcattttcccgctgaccgagagcaggcggtaaataagcggatgcggcgagcgtataagacccgtccggctcaatcagaaaaatccaccctgtctgcagtccggtcaggctgagcagttcgcggagcactttatcaagcgcttcctttaaatcgtggttttggtttaaggtttccgcaatcgcttttaacgtttttaacgtttctaccgtcgttttcgtcaatttccctcactccggccaatcagaattatccatattatatcaattcttttctgtatattcctttgttttcagcatgaattttcctcatactttcggatgaggcgtataaaaaaaccgccggatgtcgcttccggcggtttgttgtttatttcgttttttccactatgccatccaccgttttcatgacggcttcagataatgcggcaagacgctgttcgctgtcttgtaaagaagtccccttcacggcgaaatagaacttcactttcggctccgttcctgatgggcgaaggcagaaccaagagccgtcttcaaggaaatatttcaggacatttgacttcggcagatcaatatcttcttcaagatgatcggcaaatacagtccgttttcccgttgaatagtcttcagcctgcgtgatttgttttccggccatctgcttcggcggatcgtttcggaatgaagtcaggatagcggaaatctgctctgctccctgtttcccttttaacgtcaatgacttcaagccttcacggtaatatccgtattctttaaaaatggacagcagcgcgtcataaagcgacatgccctgctttttataaaaggcgcatacctcgacggctaacagcgcagcctggatcgcgtctttgtcacgcgcgaaatcgccgattaagtagccgtagctttcttcatacccgaactggaacgtgtattggcctgatttttcatattctttgatcttttcaccgataaatttgaagcctgtcagcgtgtcaaccgtatctaatccgaacgatgaagcgacagcgcggcccaattcgctcgtgacaatcgttttcatgacgacaccgttttcaggaagggtgccctgttttttcttctcggaaagcaggtaatgcaataaaagcgcgcctgtctggtttcccgtcagcactgtgtacttgccttcgctgttttttacggcaatgccgagacggtcggcatccgggtccgtagcgacgagaatatcggcattttgttcttctccgagcttaatggcatattcgaatgccgcgtgctcttccggattcggcgatttgacggttgaaaaatccgggtccggcagctcttgctcctttacgacggtgacgtttttgtaaccgagtgcttcaagaccgcggcgcaccggtttatttgccgtgccgtgcagcggagtgaacacgacgctgacatccacttcatccgaaagctcgggatgtacggagatggaagtcagtttttcagtatacggtttatcaatttcttcaccgattattttaatcaaacctttttctttcagcgactgttcatcttcaacttgaatcgttaattcattttctatggcattcacttccgcaatgacgatgtccgcttctttcggcggcagctgtgcgccgtcatcgccatacactttatatccgttatattcaggcgggttatggctggccgtcacgacgatgccggcataagcgttcagctttctcaccgcaaaagacagctcaggcgtcgggcggagctcatcaaagacgtatgtttgaatgccttgggaagcaagggtttttgcagcttccatcgcaaactcaggagatttatgacgggagtcgtatgcgatcgcaacccctctttttttcgcgtcttccccctgtttcgcgatatacgccgcaagtccggcggatgctttgcggaccgtgtaaatgttcattctgttcgtacccggcccgatttctcctctcatgcctcctgttccgaactcaagatttttgtagaaaaaatcttccagcagctgctcgtttccttctgcgtccgccaataattttttcaattctgaatctaattgttcggcctgattccagcgttcgtaactcttactccaactcatgttcgtcctcctataatttcagcttatgaccatattttaatatgaagcggctgcccgtgtcacttgataacttaaccaaatgctttatgtaaaaagataaaagaagggctcatgccttttcggcacagccctccggttattattgttcgagcggaacaaccgcgtcgtgcagcagcgtatttaaccactcagtgtgtttttctttcgtttcgtcattccattggaatcggtcgctcatgtaatcaatcacggccgttttatacgtttgcacccatttgatgtcgaagaacagtcttcccgttctgcggacgaagaaatcggcaggtgtcgcagccatttcttcttcgatgctgtaagccgcttccgccagaatgtgaaccggaatctcgcgtttttccgcttcatctttcaggccttcaatccggctgaatacattttcaacgttagagccgtatctgatggctaactgcttagcggtttcctgtgataaaccgattttcaagccgtcttttgtctttgcttccacaaatgactcgaagtttttagagccgccgacatgtccgccggaaatcggcatcgtcttcgtcttgcagccgccgaagtcctggccgccctcttctttcaagcggtcgcggacaagatcgacaatgtgctcagccattttacggtagcccgtcagttttcctccggcgatcgtaatcaggcctgattgagatgtccagatttcatctttacgggagatctcagacgggtctttcccttcttcgtgaataagcggtctgaggccggcccagcttgattcaatatcgtccgccgtaatgttcagttccgggaacatataattgatggagctgacgacataatcgcgatcctgcaccgtcatgcgcgggtgctcaagtttttgtttgtaaaccgtatcggtcgtacccacgtatgtttttccttcacgcggaatggcgaacaccatccggccgtccggcgtatcaaagtacaccgcctgtttaagcgggaatacggattggtcgaatacgagatggaccccttttgtgtgctggagatgttttccgcttttgctgtggtctttttctctcagttcgtcgacccacggacctgtcgcattgacgatttttttggcgtacactttgtattccttgcctgacagcagatcttcaattaaaacgccgacaacttttcctttttcataaagcagttctttcactttagaatagttgacaggctcagcaccgaatttaacggcttctttcatgacttcaatcgtcagtctcgcatcgtccgtccggtactctacataatagcctccgccttttaagccgtcttttttgacgagcggctctttttgcagcgtttctttagcagacagcatgcttctgcgctctgatttttttactcccgctaaatagtcatacacacgcaggccgattgaagtagagaatgaaccgaacgtgccgcctttatgaaacggcagcagcatccattccggcgtcgtgacgtgcgggccgttttcgtacacgatggcgcgttccttaccgacttcagccaccattttgacttcaaattgcttcagataacgcaaaccgccgtggacaagctttgtggatcggcttgatgtgccggccgcgaaatcctgcatttcgctcaaagcgactttcattccccttgaagcagcgtcaagcgccgtaccggcacccgtaatacctccgcctataataaacagatcgtatgtttttttagtcatgtcttccagcatatgatcccgttccaaacttgaaaattggtgattcatcattacgcttcctccttgttgtcacggtatagaaaaagagaccacaacagccaaagcgcatgtcatcactttggtgctgtggtctctcctcatctcaggaccgttcctattaacttgttttcagtataccataattttatcttatttaaaagccatagctgcatttactgcttttttccatccgccgtacaattcaacgcgtttttcatcttccatttccggtttgaattgcttatcaaggttccactgatcggcgatttcagtgctgtccttccagtagccgacagcgattccggctaaatacgcggcaccgagcgcagtcgtttcattaatttccggacgttcgaccggcacatcaagcaagtcgctctggaactgcatgaggaagttattttttaccgctccgccgtctacacgcaatgtttttaaagagatgcctgaatcagcctccatggcatcaagcacatctttcgcctgatatgcgagagattcaagcgtggcacggataaaatgctccttcgtcgttccgcgtgtcaggccgaaaactgagccgcgcacgtcactgtcccagtacggtgtgcccaatccgacgaaagcgggcacgacataaacaccgtcagcggaatccacacgctctgcgtatgtctcgctttctttcgaatcctggaacatccgcatgccgtctctcagccattggatggcagaacctgcgacaaagatgcttccttccagcgcatactcgacttttccgtctaatccccaggcgattgtcgtcagaaggccgtgatcagaagtgatggctttttctccggtattcatcagcataaagcagcctgtgccgtatgtgtttttccccatgccttcttcaaagcacgcctgaccgaacagcgcagactgctggtctccggccgctcccgcaatcggaatatttttaccgaagaaatgataatcaaccgttttcgcgtacacatgagaagacggtttcacttccggcagcatggatttcggcacgcctaaaatatcaagcagctcgtcatcccattttaattcatgaatattaaacatcagcgttcttgaagcgttggaataatccgttacgtgcgccgcgcctccggacattttccagatgagccatgaatcaatcgttccgaacagaagatttccgttttccgctttttcccgcgcgccttctacattgtcaagaatccatttgactttcgttcctgagaaataagggtcgatcaaaagtcccgttttttctctgaatgtatcattatatcctttttcacgaagctcttcgcaaatgccggatgtttgtctcgattgccacacaatcgcattgtataccggctttccggtatctttatcccatacgaccgtcgtttccctttggttcgtgatgccgatgccggcaatttgatcagcgctgattccggactcggaaatcacagtcgcgataacggcgagcaccgatccccagatttcgttcgcattgtgctccacccagcccggctgagggaaatgctgtgtgaattccttttgagcggaatgcacgatttttccttctttattaaaaagaatcgctcttgaacttgttgtgccttggtcaattgataaaatataggtctccatgatgccgctctcctttttaaatatattcagaatttgataatgttttctgtgattgagatttcttggtataaatatagagtatgaaaagcactacaaccattataacgcttacaaaccaaaagctaggtgtcacatttcctttaaacgcggcattgtaaaatacgccgccgaacgcaccgcccatgatcggaccgattacgggaatccaggcatatttccaatttgacggcccttttttcgggatcggcagaaaggcgtgagcgattctcggccccaaatcccgcgcagggttgatcgcatatccggtcgtccctccaagagaaatcccgatggcaacgatgaggaatccgacaatcagcgggttcagcccttttgtaaattcattcgctccgattgccaaaatgccgagcacaagcacaaacgtaccaatgacttcacttatcatattcccaaatgtatggggaatactcgggccggtcgagaaaacgcccagtttagcggccggatcatccgtcgccttccaatgcggcagataatgaaggtacacaacaaccgcaccgatcattgctccgatcatctgtcccgcaatataaacagggacgtctttccaaggaaagctgccttcaagcgcaaggcctatcgttaaagccggattcaagtgagcgccgctgatgctgccgacggcatatgccgccatggctactcccaatccccagccgaatacaataacaatccatccggattggtatgaaagcgatttctttaagttgactcccgcacaaacgccgccgccgaaaataacaagcagcattgtaccgattacttctccccaaaatgctgtcatcatcattcctcctaaatgacaaaatagcaggtttgacagagttatagagaataaaaaacccacaacaaaccgctttacgctttattgcttccgtaaagagctgttgtgggtctccgggtctccatcacatagtattaacctaggtctattgtaacaatgggtgtaagcggtgtcaatctttttttgtcatagaatgttcatatttagcccatagttcggtgtctgaagtcgtcacggccgtggctcctgcctgcaaggcgttttcaacgtcctgctccgtgcggatgaagccgccggcaaaaatcggaatccccgtcatttctttaatttctctgattaaagtcggaacgatgcccgggagaacctcgataaagtcaggcttatgctttccgacgaattccatgcttttttccatggcgctcgtatccaagagaaacagacgctggatcgcgtatattttcttttgtttcgctttgacgatgacggcggatctcgtcgaaatgatgcccgcgggccggatgtcctgacaaatgaactccgcaccgtattcgtcatgcttaatgccgtgaattaaatcgacgtgaaccatcagaagttttccgtgttttttcgcttcattcacgacaccttttaattgaccgaggtgtatatctaaaatgacgccgtataagaacggactctctaaaaatgcatcgaattgcttcatgttccggatagccggtagaatcttctggttgtgaaaactcatgttttactcctttactttaaaaatcaatgctcagcacgctttccttgacggtcgaaatgatgaaagagagctcctcgtcggacaggcaaaaaggcggtgacagctgaatgacattattatatcccgctacagtatcaccatttttcccgacaagcaggcctttttctctgcacgcggtgatgacgtgctgcacaagagcggcatcagcgggttccttcgtgattttgtccttgacgagctcaatgccggcaagaaggcctttgccccgtacatcgccgaccgccggatgttctttgagcggctcaagctcacggagcagccgttctccaagctcccgggagcgggcgatcagattttcgtcctccatcaattgcaggtttttcaaagcaagggcgcaggctgccggattgcctccgaatgtattcacgtgccggaagcggccgtacggctcaccgcccgaatacgcctcaaaaatctcccgttttactgccgttgccgacagcggcagataagcgctcgtaatgccttttgccattgtgacgatgtccggtgaaacgccgtaatgctgaaatccgaacggctctcccgtgcggccgaaaccgcaaatgacttcatcactgatcagaagcgcgccgtggcggcggcaaatgtcctctacctttgccatatacccgtccgggggcatcagtatccctccgcctgtaataatcggttccataataacgccggcaatcgtttcgcttaactcccacgtcatgatccggtcgatttcatgcgcgctttccaatgtgacggcatcgccgggattccgataaagatcaggcggcgccgcgtgcaaaaaaccttgtgagagcggctcatatttatattttctctgcgcctggccggtagcggcgagcgcccccatcgtattgccgtgatagcctctgtaccgggagatgaatttgaagcggctgtgatcgccgttttcaatgtggtattggcgggcaattttgaacgcggtttcatttgcttccgatccgctgttggaaaagaagattacataatcgccgccgagccattcattcagtttttccgcaagctcaatcgcgggttgatggctttgggtcagcggataataaggaagctccttcaattggctgtaagccgcatcggcaagctcctttctcccgtatccgatattgacgcaccacaatcctgacatgccgtccaaataccgtctgccgtcaatgtccgtaacccaggcgccttcccctttttggacgattatgctgtcatccggctccgcccctttcatcgcgtgccaaatcagctctttatccttttgtttgagtgactgatttttttgtacatgttccacaccgctcatctccctttcaatatcattgcactgtatcgaaagctgcccggcttctgacgccgattctcatggtgaagttttcctcttaataagaatataaaggcgcggcatgggcgagtcaataaagcggcggcaattaaaaaaacgctttctcccagaaagcgaaagggctacaagagcatatcccgaaaccggggccggtgcaagtgtttttataaaaaaacccgcccttaagcggggcgggcgtttttttatttcagatgcgtaatccggtaaatgtctttgcgccggtctttcagctggcgcacggttccgttttcacgctgccttcttaagatttcaaggtccacgtccccgatcacgaccatttcgatattcggattcgtttcaccgacgattccgtctctggcgaattcaaaatcagacggagcaaaaatggctgactgcgcgtattgaatatccatattttctgtttgcggcaggtttccgaccgtacctgagatgacggtgtaaatttggttttcaaccgctctcgcctgagagcagtaccttacgcgcaaatagccttggcggtcttcagtgcagaatggcgtaaagataattttcgccccttgatccgcggcaattctcgcaagctccggaaattcgatatcgtaacagatctgaatggcgatctttccgcagtccgtatcaaatacgcgcaccctgtctccggcgctgatgccccaccatttccgctcattcggcgtaatgtgaagcttatattgtttttcaatcgtgccgtcacgtctgaataagtaggcgatgttataaattttcccctcttcttcaacgaagtgggagccgccgataatgttcacattatatttcaccgcgagatctgtaaagaggctgatatagtcctcggtatattcggtaatcctctgaatggccagactcggagaacgctcttcgagaaatgacataagctgcgtcgtgaaaatctccgggaataccgcgaaatcagatctcgcatctgaagccacatcgacataatattcaacctgattggcaaattcctcgaaagaataaatctttttcatttcatattgaatgacgcagatgcgcaccggaaatgccgatttgtaatagcgctttgactgcggcagataatcgacattgttccattccattaatgtcgcatatttaatggacgcggtgtcatccgggagataattcggattgatccgcatgagcgtaaatccgttcatcagctggaaagaaagcaccgggtcataaatctgatggcgcgtcacctgttcgacataggctctcgccgtcatttcttccgcatacttatgataattcggaatccgcccgccgataatgatgcttttcagattcaatcgtctcgccaagtcttttctcgcctcatacagccggtgtccgattttcatccgcctgtattccgggtgaaccattacctcaatcccgtacagattcaatccgtccgggttgtggttcgtgatataaccgtcgtctgtaatgtcctgccacgtgtggcggtcatcatattcatcgaaattgatgatcaggcttgagcatgaaccgataatttccccttcatactcggcgcaaaactgaccttccggaaagtgcgcgagatggctgattaaatgctcaggctcccacggctccatccccggaaaacaatccttttgcagctcaataattttgttgatatctttctcttccatattccgtatgaccattttcttttcaaaacgggtcagatcaagtttctcagacaatgctgcttccccctgccggttcgttttgatcgttcaatcgctgtaagagtaattcaagttccatttccgccatcgattccagtctgtgatcgtattcttcaaataacagggcgctcgttaccttattcggcacgatgacacatttcatgccggcgcgtttggctgcgattgagccgttgaccgaatcctcaaaggcaagacattcagaaggttcaacgcctaaatgttccgcagctttcagatagagcttcggattgggcttcacttcttctacgtcgtcagccgtctgaatcacttcaaattcatcaaacaggcctaattccttcagatggcccgacacccatttaaaatctgagctggaagcgagccccaccttcaatcctaattcttttgccgcggctaaataagcctccactccgggacgcgccgtttccgtcttcatccgctgttcgaagcgcccgcgcctgatcgccgtcagttcatcatgatcgagctttcttcccagctgctcctctaaatatgcgaacggcttaaaccccgccgccgttccgatcacctttccccagacggataaaggcaatgttgaaccgtgttcctcaaacatttcctgcagcacttcatattcatgggtttctgtatctaaaattaacccgtcaaaatcaaagattaatgcttttatcaatggttacagctcctttagctaaacgtactgacctatgtatacactataccgtgaatttcttttgcattcaaaatgtaacattctcacggaaagaagagcctgcatgagtgcaagctctcttcatccgttactgtgtgttttgactggaaatattggaaagagccgctcccgcagactcatttgaacgctgatcgaccgctaagtctccaagcgcaacgatcccgaccagatgattttgatcgacaatgggaaggcggcggatttggtgttgggccatcagatgtgacgcctcttcaagactcatttccgggtttccggatacaacttgagaagacatcacgtgtgaaacaggtgtttggccgtcgcggccttgagccgttgttctcaatgcgatatcacggtctgtcagcattccttttaattcccctccgtcaacgacgggaattgctccgacattatgctggtgcatcagcgcagccgcttcctggatcgtttggttgggagaaacggtagccacgtgggtagtcattgattgtttgattgaactcattgtaaagcacccctttcgcattttattatgctcggggatttgactcattataaagggagttagaggaaagaaattgtggtatcatgtcaaggaagcaaaaaagagcctgtcaaaaggctctttatacccgtcagatcagccttctgtgaccgcaggcttctgatccggcccctgtctcgaaatcatcataggtaaagggaaaattcattccgcattcattcagcaaagcgcaatttttatcaaacagcgcccgctctttgacgtcatatacggggtgcggctttgacagcatgatatgtaccgtttgcagacaagccataatttgaaacgcttcttttaaagttccttggtaacgttggttttgtaaagacaatacgcccctttttttaaagcgctgaatttccagttcggagaaataaagaggaaagacattttgaaacaattcagaggaaagctcttgtatcgcgctttcttgtccgtcagtcgctgcgttcacaattctcacatcaatcacctttcttgccatgtgaatatccttaatctttatcaagaatagcatagaaaaaaacgcgaaagctaaggtaagtgtttcctattgaaacagccgctttccgcttgaaaaggagctttatgatatgaaacaaaatgaccgcggtctggaactcctgattacggaaaaacacgccggacaatggctgttttcagtcctgaaatctgaattccaggcgtcaaaacccgtgataacggaatggatgaaccaaaaaagcattcaggtgaatcggacatccccgaaaaacaacatcatactgaaaaccggagaccgcttattcattgatcttcaggaaaaaacgggttcttcggtaattcctgaatacggagagccggacattttatttgaggacagtcatatgctgattgcaaataagccggcgggaatgccgactcatccaaatgaagagggtcagaccggaaccctcagcaacctgatcgcttaccattttcaaatcaacggcgaacaagcgaaagtgcgccacgttcaccgtcttgaccgtgacacgtcaggcgcggtcgttttcgcgaaacaccgcctggcccatgcaatccttgaccgtcagctcgaaaccaaaacattaaaacgcacctatatcgccgcggcggaaggaaaagtcacgccgaaaaaaggcacggttgactcgccgatcggccgcgacaggtcacattccgtcagacggcgcgtctcacccggcggacaagccgccgtcacccattacaaagtgaagggctatcatcccggtgcgcagcttacattggcagagcttgaactggaaaccgggagaacacatcaaatcagggtgcatatggcaagcatcggccatccgttggcgggcgatgacctgtacggcggaagcagggcgctgtttcacaggcaggcgcttcacgccaaaaaagtcagtgtcgtccatccgatctcaggagaagaaatcgttgccgaggcgccgatgccggctgatctggctcattttaccgaaacgtatttttcttaaaccgggtcggcatatataatatatcgtttcggcgcatttccaatgtaagaaaacggatagcaagtggtcaggatcagttcctcccgcttgtgttgaagggtgatgacagacgtatcatcccggctgacgatttttgtacggctgattttataagaaaacgtgccgtaagacaaaatcacgttcagtctgtctccttttttcagttcgccggtccggcggaacaccgtgtccctgtggccggataacacaatttggccgtgatcgccaggataatagctgtccttataatgtccgacgccttttgctaaatcatctgcgtcagtcccttcgacgatcgggagctcagcgtcaatttcagggatttctaaaatgccgcttgcctcacccgtttcggggtgaaattcttttttgcgctgtgcctgcacagcgctttttgtttcgttcttttccaagacaggttctgttgctttttttgcttcttcaagcgattggttcgttttcatatgtgaatcaatgatcttccagcttccgtaacatgtgatgataacacctgcgatgatgacgagaagcggaatatgtttcagtttgttcatcgtgtgcgggttccccttttctttctgaaaagccaatatacgccggcacccgtgatcaccaggccggccaatgccgtctgatggctgcccgctgaagtatcaggcaatgggcggcctttttgtgtgccgctttcagtctgttctgtgctttgttccgaatctgcggcagacgccgtacgggattcgggaattgactgcactgtatcagatgctgcttcttttacgacaggacgttcaggttttttggtttgatcaggctgttctgctgcatccggttttttagcgggtttttccgtttgaggtttttctcctttatcaggcccggtgctgcccggtgtttccccgcttcccggctgattgccggtgtcatcaggtgtttcggcggctgatgccgtgcggatgcggccgtcggtttgataagaaatcggtgcggaaaagcttttgacatagtctactgtcgcttccaaatcctcaggccccgtcaccggattcttgccgagtttcccgatcggaccgtattttgcccccgctgccgtcgccataaattgattgactgttactgtatatcctttttcgggctgtatgtctgtaccgtccgccattttcacatccgccgcttgtccggtttccgggttccatgtataggaaaatccgctgatgctgtaatccggtccgtacaccggagaaatttgcgcgttgatgatctcccgcaaatcttttcctttgatttcaagcttcgtcagcacattgccgaacggctgtacattataaagatctccccatgtgatcggccctttttttatgccgtcccggatgcctcccccattcataagcgcaaaatcggatttcatcttcgctttcataccgtcggcaatcagatttccgagcgccgtgtcgccgtcatttgaatacccgcccgttatatcatgggccgcttccccgaccgcttcgctgataatcggtttcactttctcttcatatttgcttaatatgcctgccgcatccggatcaggcttgattttactttgatcgatatattggatttccgctgattttttcacgatatccttcgactctttatctagttcgagatcggcgattccgattgcttttccgtattcaaatgcctgcacgatcagcttgccgttgatttctccgtttacgactttatgattgtgcgcggcgaaaatcacgtcaatctctgagtctgttccgcttgcaagctttgcggattctcccgtgatggctgagccattttgttcagcagacatatgggcgagcacggcgattgctttaattccttttttcttcaggtctgcggcggcgtcattgacggcctttacctcatccgtaaacgtaatatttttaattccgtccgggatgaccatgcctgccgccgatctggttacaaccccgataaatgcgaccggaattccggaaacgtatttgatttcatacggcggcagaaaggactcccctgacttcaatttacagttggcgcagacgagcgggaaatcttggccgtcataaccgcttgtccccttaccgtccggatgatctcctccattgatgatccgtttaagctcattcgttccttcatcgaattcgtgattgccgacagttccgacatcaaaaccgatgtcttccatcaattctactgtcggttcatcctgaaaaagggctgacacgggagagctgcccccgatcatatcgcccgcatgcacgacaaaggcgtgttctttctcggctttcgcctttttaatgtacgcggtggcgtagtccatccgtccgaaagtgccatccggtttaccgtctccgttaaggtcaagctcatattgctgatcaatttttccgtgcagatcattcatgctgatgattctgagcgggatacggccggagtcttcagtctgccgttctttatacgctttatccgttccagcttcattcagtgatccggcttgtccgattgcttccgcatctttcacgctgaacatcataaaacaaaccgtcagcaaacagcacgaaagacgcaaacccctttttttcttcattcatttcccccctgtcttctaagaaatacgttagcttattttcttaaaaatcacatcacttttttgtaaagattgtcttcgctggcgcaaaatagtaaataatccccacgtaacgaaataagtcttgatgtataacggatcggcttttttcacatcttaaatgtgatttgacatgaaggaggaaaacaaccagtggaacagcagcagaatcagcagcagccgccagtaaatcaggggattccgggttcaccgcaagtgaatcacggaggacatgagcttttcgatatgcatgaagtgctggccggaacagtcggcgttttggatcaatttatgatgctcagacagtttatacaggatcagcagctggccgacattcttgaccgccagtatcaattcattctcggactctataatctgacggcagaatgctttaagaccggccaaaagccttctcaggaaacgtcgacatatatgatggaggaacagaaccaggccgtctacggtataaaaccgactcagccgaaaaaaccgaatcaatcattaaatgatgtcaaagatctcggaataagcggccatatgctcggcctgattaaagctcaagcttctctcttgacgatgagctcgcttgaaatgaccaatcccgtcacaagaagagtgctctccgcccaaattcagcaatatgtcgaaatggcgtatgaaatcttcttataccaaaacaaacacggttattatcaggttcctcagctcaatgcacaagatatgcagaccatgctgaattcatttgcgccggcgcagggacagccgcaaatgcctccgattaaaggacaaatgggacagcagcagcaaaacctccattaatgaaaaaaacggcgttggaaagctgactctccaatgccgttttctttttttcatatgcttttgtgaaatcatgttcaaattgtttcaggctttctttcgtagctgcttcaaagcctttttcaaaatcctgtgtttcggcggttttattgataatggttaagataatgccttctccgaatgtttcggttaaatcctttatcatatagaaactttgcaaataaacatccgtttcatattccatacgcgatttctgccattttcggtcggtcgttaattgatcaaacggcacgacggaaaatgcaatcggatcaatgaccacatcataatgcgcaacccactcgctcagcccctcatgaaaccaaagcggaaatacagacgtatccgtccccaattgccgcgctttttgatgaaatgcgtagtgtgtatattcatgtataatcaattgcttatacatgaaaacggccagctcatcttttttcaaaagctgttttttctcttctggcaagagccccatcatctgctcctgctctgaataaaaaccgactacatttttcaatcctgagtattgctccatttcagcttcatccgaaaagaaaatgagttcaagaggcgccgctcctttatagccgacaatgatttggttgatacgctttgcgtggtccagcgtaagcttggtcagatccaagagcggcttttcatccgctgtatagtaaatcgctgtatgtttgtaaatttctttattcatgtgttcagtcacttgttccttcgtcggaacagagcggctgttttggcctgacaggacgtacatcatacttactgaaacggctgaactgacagccaatatgacaaggactccgcacaggatcagagtgaatgccgcccgtttccccatgccgtcacgcaaacaagctcccctccccgatcctttaattttcatctcattctttactttatgctcagaagcgctgggtcgtgacggcagataaaataaaaaagccgcagcaaatgcggcttttccattcatttatttattggggtttgggaatacacgctgcaccatttggccgaattcatcaaacagtccggataccgggtggccgttttggattcgttttccgtagccttgcatacgttcaacgaagtccgggtttgctgatacatatacagtccggacatgtttatcggctgatttcaccttatcggtaatcttatttttcaaatggttggcgatggcgcctttttgtccgtttgtcagaacaacggctacataagcgctgtttccggcaacgatcacagtcgcatttttaacttcttttaaatcagtcaccttgtctgcggctttatcagccactctcaggttacggttgtcattgtgatcggtgttttggttatgacggttcactgtattcatatttgtcgcaccgtcgttaggtgtgttgcggtaatttacattctgggtgcggttgtcatttcgttttccttctccctggttccccatactgcaccctgcggtaatcagcatcggcagaagaagggcagaaataactgcttgtttttttatcatgtgaattcctcctttctcactttacgtataggtttttctattcggcgggatttatgcacgccgtttgcattctgagcggtttggataaatatcagaaggatagggaaaggtaagcgtaatcaattgaatgaggagggatttaacttgttcagacaaaaaagcggcatcagcccgacagcgctgctgatcggatcatcgattctgattgcagctttatcacccgaaatccgccggaaaatctccggaatggtttcaggccgaatgcagcataaagatggtacacactccatgcagcctgctgacctgattcaacaggctttcagcggggaatccggcggacagcagcacacggacaaagcacggcattcacaaacaggctccatgcagcctgccgagctgatcaaacaggctttcggcggggaatccggcggacagcagcacacggacaaagcacggcattcacaaacaggctccgtgcagcctgccgagctgatcaaacaggctttcggcggggaatccggcggacagcagcatgagcagacttcccgcaatcactccggctcatcccatacggacggacaggcagaccgcagtaaagaaacttcgccgaagcctcactataccgagccgattcacttcgaagaaagcgcggtaaatgttttaaatgacagcaccgtgatgaatatgctggaagaaattgaacccggaaatcattagaaacgaaaaaaatccttcattcgttcaacgatgaaggatttttcgttttagcgctatctgcttttttattaagcttcttcagcttcaatgacgattgaggaatcattgtacaccgcggtatcggtttccttcgtcattttacttgttaacagccctgcggtcatactgccgctgacatttaaggcggtacgccccatgtcaattaacggctcaattgaaatgagcagcccggcaagcgcgacaggcatgttcaaagcggataggacgagcagagccgcaaatgtcgcgccgccccccacgcctgctacaccgaatgaactgattgccacgatggcgatgacggagatgataaatcccggttcaaacgggttttgccctactgtcggcgcaatcatcatcgcgagcatcgccgggtaaatgccggcacagccgttttggccgatcgataaaccgaatgaaccggcgaagttcgcaattccttcagggacgcccatgcttttttgcgttttaatattaagcggcaaagcccctgcgcttgaacgggacgtaaacgcaaacaccatgacaggaaatgcttttttcacgtatgtgatcggatttaaaccgctgaacgtaatcagcagcaggtgaacgataaacatgacgataagcgcggcgtatgaagcgatcacaaacatccccagtttcgcaatgctgtcgatgtcgcttgtcgcgatcgtctttgtcataatcgccaataccccgtaaggcgtcaatcttaaaattaacgtcacgacgcgcataataatcgcgtataccgcatcgacaattccgctgaacgtcgcagcgtgctccggctgcttccgtttcacgcccagaaaagcgatgccgaggaaagcggcgaaaataacgactccgatggtggaagtcggtctggctcccgtgaaatcaagaaacggatttcccggcagaagctcaacgatttgctgaggcagcgttttggccgtcatatcctcagatttttgctgcagctcctggcctcttgataactcggtgcttccctggtcgatatggacggctttcagatcaaaagaaagcgccgaaacaattccgactgccgcggcaattgctgtcgtggcgatcaaaattccgatgatcagtccgctgattttcccgatgttatgggtcagtttcagcttcgtaaatgcgccgagaatagaaataaagactagcggcatgacgatcatctgaagcaatttgacataaccgccgccggcgatattaaaccaatcggccgtttgtgtcacgatatgtgatgccggcccgtaaatcaattgcagtgcaaaaccgaatacaatgcctagtccgagcgcggtaaagacacgtttagaaaaggaaacgtgttttttttgcatgacaaacagacctgctataagcaaaagcataataaaaacatgtaagactacaaataaattctccaaaacaggtaaacactcccttgctcattatcctttaacactatattatatcaattccgatcggtcaagtaaggattgacaatatatgtatttttattgatttttctcttttctttccaccctttctctagtaacttatataagggtgattgttatgctgaaggaactgtttcttaatttaacgattttaatcacatttaattatctgttcacccttctttttaaagagtcgctttcgtataaagaagaccgtccgatgtttcaattactgaaggggacggtctgcgggcttttaggggtttttctgattgctttcggcttttcttactccgattccatcattgatctcagaaatatccccattatcatcgccgctctttacggaggctgggtgtctacggcagccgcctttgcgattatcgtcgcaggccgtatcctgatcaatttcaatgcaagcgccattttttccatcgccgccgtcggggttattgcgatactttctgcggccgtcctcagaggaaaaaagccggatcataaaatggcgttcgttatgctgcttttttcaaatgttattttcaccttgacgctgctgtttcttatgcctgaacagcctgccggggccctcgtttattattggctcatttccatcttgggcggaatgctgtcactgtatatcatcaaacacgaagccgatgcccgcgttttgttcaagcaatacaagtttcaagcgaattatgattttctgacggggatttttaataagagaaaattcgaggaagtctcgcgcgttctgtacgatcggacgtctcaatccccctcgtctcagctcgcgcttatttatttggatattgatcactttaagcagatcaatgatcaatacggccattatgaaggggaccaagtgctgaaggaactgggggcgcgcctgaggttcttactcagcagttctcatacgtcagcccgcatcggcggggaagaatttgccgtgcttatgcccaattgcacgtatacaaaagggcttcacctcgcagaggaaatcaggcacacgattgacgcgaacccgattctgctgacgagcggagatacaattcccgtgaccgtttccctcggcatcgcgcattatccgacaaatacaccggaccctcagacattgcccctgatcgcggaccggatgctgtacaaagcgaaaacatcagggcgcaatcaagtgtgcagcactgaaaaaaaagaatgatcgcccgaagaggaaatcattctttcttttcagtgagaaagccgcccctcaggaaaacgggaatcaggctgccctcatattctttttcaatcaacgccgcggtatcatctgattgatacaaagacaggagtttttgcatccgttcatcatctttatcctcagctctgacggcgatcagatgaatatacgcttccttcatttgcgccgatcggatcagcgcgtccttctccgcatgaaatcctgcttttttcgcctcgctttgactgagaactgctgcgtcagcatgttccgccgcctgataggcgttcttttttgtttccgtttttaaggtcagatgcttcgggttgtccttgatcatatccgttgaccccgtaccgctgaatccctttttcaatgtaatcagtccggcctcctgcatgagaaaaagcgccctgccgaaggccgccgcttcatcaggcacggcaatgaccgctccgtccggtatatccttcagccgtttatgttgcttggaatacacccccagcgatgccgcatatgtcgttcctaaaggggccagcttctttttcacgtgaggcggcaaagatttaaaattagtaacggattgaaacgcattggcgtcgagatccccgccggcaagtgccaaatcggcctcagcataatccgaaaacgttaccaaagaaagctgcaatccttcctcaccggcttttttcgcgacaaactcccagatcgattgatcagattcattgattccgatagtaatggtccggttcccgtcaggataatcgcatgaagtaagtgacatgatcaaaatgaaaagaaacagactgtttataagccgcagattcaagttgacctactccctatctatttttatgtacagaagctgcaccatggtattcgggctcatgattacatacaataccgattaaaaaaagggttgtcaattgcttccttaagaggctgcaaagcggtttttatcagctgcaaatgggctgttctggtctcaaatcagatttccgtatcagagcgttttcctcttaaaacatgttatttcgaaaaaagttacatttagcagttgttttttcttcggattactggtagagtaaaggtaattatttttgttcgaactatctttaagaagaaagttttgtaagagttttcgtcttggaagtttgttttagagcaagaatagtgaatttaagcgtttgtcgctttaggaggaaatttcatgttagaaggtaaagtaaaatggttcaactctgaaaaaggattcggattcatcgaagtagaaggtcaagacgatgtattcgttcacttctctgctattcaaggcgaaggcttcaaaactttagaagaaggccaatctgtttctttcgaaatcgttgaaggaaaccgcggaccacaagctgctaacgtaacaaaagcataaattgtttaaaaaaacctgccggtgtacgccggcaggtttttttcatctaaaacgaaaagctgttttgcaaaggcaaaacagcttttttatatcaggtggcaatatcccgttttaagaagacgccgaatgcaagcgccagaaaaataacgaagtaaatcacaagcatcacaaccgaaaatgtcatcgtcatcccctctactaaaggagtcccgttcatatattgcgacaaatccgtgttcgcaaataaaatatatttggtccattcaaatttcgcagcaagaaataccgtcgccgtgttccccataaccaatagaaaaatagaaaatccgaccgctaatgaactgttccggaataccgcagacagcataaacgccatcgtcgcaagcataaaagcggagacagattcatagacatatgttttagcgaggaaagcgatgatattttgctcaaaaacatggccgtctttgtatacgagatgaacatcagccgcagtatctccgcctgtaccgaaaaagaccaatcccaacagagcggagccggcaaataaaatcacaagcatcagcagtccgaacagcagcactgtcatatatttagaaagcaaaatctgaaaacggctgagcggacggatggccagcagcttgatcgtcccccagttgaactcattcgccacgatgcctgcggcaatgataatcgtaaacagcccggtcaaaacagtcatcatcgaagaatcagatacgtatgaccacactgtgtaccctgtatcctcggggatgttatgatccatacggtattgatttatcgcgacattctgtttcaggttatcaatgagcgtctgatttccggtttccttcatctgctgtttcatttctttgttttcagcctggagctcctgtttccaattcggattggcttcgttcgaggtgaaatggtttgacagaagcgcaaaaccgatcatcgaaacgcctaaaatcacaatcatagcccacgtgccgacgcggctgaaaattttaatccattcattatagatcagcttaaacatattgaacctcctctttcgtcccgccggtaatttccaagaaacggtcttccaaagattttgtcatgattttcacttcatataagcggatgttttcacggacgagcagtgatatcacatcaggcacttcctgtttggacagctggatctcaatgccgtttgtcttcttcacacagtcaaactgactcaaaacggcaagagcctcttctctttgttcaatatggaagaagtatgtatctttatcctcttttccttcatcccttactttttgaatatcgacaagctctcctttttgcagaatgccgattcgatcgcacattagctccatttctgacagaagatggcttgagacgatgacagccattcctttttcacgtgtcagctttttcagatggtccctgatttctctgatgccggcgggatcgaggccgtttgtcggctcatccagaatcagcaccttaggattatgcagcaggctttgggcgaggccgagacgctgtctcattccgagagagtaggtttttactttgtcatgtattctgtcctgcaacccgacgagctcgatgacctcatctattttttctttcgtaacgccttttaccatccttgcgtactgctgtaaatttttatagccgctcaggaatttgtacagctccgggttttccacgatggctccgacgtgcctgaccgcttttgcatagtttttcgtaatggattccccgcagattacgatgtctcccttagacagtttcattaatccgaccatcattctgatcgtagtggttttccccgctccgttcggccctaaaaatccaaacacttcgcccgcccggacggagaagctcagatcatgaataatcgttcgtccttttatcgttttctttacctgttgcagttctaataccgtttccaattagaatcccccttctatttcgtgcgcctgcatgacgtttctataccattgcagcacggacattccttcctgttcccgaatttcttcgacctcgcgccgttcagcgattttcccttttatgaaaaccatcacttcgtctaacagcgtctcaatctcgccgatctcatgcgtggcgatgacgacgatctgactgtcaaaatcaatataagatacgagactgttgacaatcgactccctgaccgccggatcaagacctgaaaacggctcatccagcagaatgaccgatgcttttctcgacagggccaaaacgattttcagcctgccccggctgcctttggacagctcttttaacttctgcttcgctgaaagattcatttccgctaataggttatgtgctttttccagctgaaaatccgggaattgcgaatgataaaacgtgagcatatcaccgacggtcgtccgggcggaaaacatatcatgttcggttaaataagccgtacgaaacagcatgttcctgcttactttgcactctcccatccggacggcgcccgatgtcggaaaagcaagccctgcaagcattttaagcgttgttgatttaccgcttccgttcggccctaaaattccgtagattttacccggagacaatgaaaatgatacatcgctgaccgcgatcctgcggccgtatttttttgttacgcgttcaaaatcaagattcatcgtttgcttcctccgcatattgtttgatcccctcgagcatttcctcaggagataaccccagctccgccatttcctgaataaagcgtttgaaaacgtcttttgtcagcctgtctttcagctctgctttcagatcggatctttccgctataaaggttccctgtcctcttctcgtctccacgatccccagcctttccatttcactgtacgttctttgtatcgtgttcggattcactttcatctgtacggccatctcccttacggacggcagtttgtcccccggtgaaagctcacttcggatcagccggtaatatatacgatcggcaatctgcagataaatgggcttggatgactgaaattcattctccatcattacacctcaacctttcgattcagcagtatagaggccagcgcgagacagagcgctgcaagcacgatcactgccagaaagctgaaaagcgaaatgtggacggctttcagctccatcgtccatccggacaatttcgtataatgaaaatgaaaattcgcatacacttttaccggccataaatcatgttgagatgaagtgaaaggcgtaatgattttatcgtcaatataggtccagacaaacgcaagcacgatgcagatcccccaacggaggacgggaaaatgttttaatgagtgaaaaacagtccaaaatacggccacgatcacagataagtacgctgaactgatcagcaggtaagcattcagcccggttaatgtgccggccaggggaatggtgtgttccagcactccttttgcagaaagcatccggtacatccaaatgccgtaacccgtcagcgccagctgcccgatcaactgatacagcagtgaggccgtcagcttggaagccagcagataaaatcccccattcggattgtaaagccacagctggttttttccttctttatgaaggtgataatacataaaaagcggcgctacaagaaattgaaaaaaccccattgccgtaaaaaagccgaaaatgacgagcggttctttctgacgggcagcgatgacgtgggctgaaaacgcccagcaaatcatgccgcaaagccacaccgcgagccaaatccatgaaactttcgcatcttttttcagcaaacctaaaaacgatgtcattctttctctctccattcggatcaagtgtatgagtaacatagtacactagatcatcacgtattacaatatcttcaataaaaaaaagacaaatccgctcttacgcggatttgccttttcaattacttctttttgttttttaaggagagcagcgcatcacgatagctgctatcctgcattttgccgccgctatcaggatcgtttggttcctgatccgtctcagaagtcttaaacttctgaagcgcctgacggtacacatcatcgcccattgtattctttttctcacggggagattcagattttacaacgacgggagcatgctcggctgagcgctcctcggccggatcatgcttttccggctgttcggctgtagtgccgatcgcttctctcttttcttctttgacatcctgtcctgcagaagtgctgcggacattgaaggtgataagaagtgcaatcacaatgacagcagcaataaccgctataataatggccatataaccctctccttactgtcgtccggcagttagattaccagtgacctggctgacacgtctgccaagcgcacggcctaattgaaggccttcttccgtcatcagcacatcgctgtcaaccgggcatgtgacgcccgcgccgtagtaagagccgtacagcgcgttttcaggaacgttgccgggaagaccgacaacaatcatgccttggtgaaacataggagtgatcagattgtgcatggtcatttctaatccgccgtgtgttgtcgccgtcgtacagaatacagcgccgactttatcaatcagctcgccttcagcccacagatagccgagtctgtcgatccacgcttttaagcctgaactgatggtgccaaagtgtcccgggcatccccagataatggcatccatgtctttcagcttgcggatgtctgcttgatcgacatggtcgatcaggacttcagcctcagcgttttctcgtgcgccctcggcaatggcttcagcaagatgttttgtgtgttcgccttcactatcgtacactacgtaaattttcattcaggaaacctcccattcagatgattaagattccttcacttctttaggggccggaagcaatgacagctcctcttttttcttcgcccgctgtttgtctttccgcacgtcacgcaagaacagactcaggactacgccgataaccgcaaagatcgtcgcccacataaacgcgtcattaatccccataacgttggaattgagtgaagctgttttgtagagatatgaataaacggtttgtttcgccgcatcaagcgacatgttcatgttgaccattaaattcgaaaccgcgctttggaacgactgcatgaagcttggatcagccgtgcttgttttatccgcaatctgcgaataatgcattgtcgtacggttcgtataaatcgttgtgatcaaacttgttccgattgatccgctgatctggcggagcgtgttgctcatcgccgtgccgtggctgttcaaccgtgccggaagctggttcattccggctgtcataacaggcatcattaacagtgacataccgaatgcgcggatggcatagacaagcatgatgtgcgtgtaaggtgtgtcaattgtcaattttgtgtactggaatgtcgttgcgaccgtgatgaccagcccgataatcgcaagcggtctcggaccaattttgtcaaacagaataccggaaatcggcgacatgatcagcatgacaatcgcgcccggcaatagcaagagacccgattgcagcgccgtaaagccgactaagttctgcaggtaaatcggaagcaggaacattcctgtgtaaagcgcaacggtaataatgatattaatgacactggaaagtgagaaaatatcatatttaaatacccggaagtcaagcatcggtttttcagagcgcaattgctgaatgacaaacgcggcaatcgcgatgacaccgacaatgacggtagacagcacgatcggatctccccagccgtcgctgcccgcttcactgactccgtaaagcaatgaggcgaatccgacaatagatagaatcgcacccaagctgtcgagtttgattttttgcggttccaccaagttcttaaagaggaaaaacgctatgataataacgattgccccgatcggaacaaggccgtagaacataatgcgccatgtgtaatgctcgatgatccagccggatagagtcggtccgaccgccggagcaaacatcatcgcaagaccgaaaatccccattcctttccccctgctttcaggcgggaagataagcagaatggttgtcatgaccagcggctgcaggataccgccgccgaccgcctgaattaaccggccgatcagcatggttgagaagttaggcgcgattccgcagactaacgttcccgctgtaaaacagaacatggctacgagaaagaggcttctctgtccgaaccgggtgattaagaacgcagataacggaatcaaaacaccgttgaccagcatgtatccggtcgtaagccactgaatcgtcgtcgcactcacaccgaactcggtcattaagtgcggcatcgccacgttaagaagcgtttggttcaagatcgccaggaataacccggccataagcacaataagcaatgttttaggactttttacttgattatctgatttagccacctaagacaacctcccttcatggtttgatgactgatctgtattattcagagatttttacagatgcgttcataccaggaagcaccttgtcagatgggttgctgagtgaaattttaacaggaactttttgcgttactttagtgtagttgccgcttgagtttgaagaaggcagcatatcaaatgttgaatttgtcgcataaccgatttcttctactgttccgtcaaatgttgtattaggatcgccgtcaacaattacgtctactttgtttcctacttcaatgtctctaatgtctgtttctttaatgtttgcagtgatgtaaaggtgtttcatgtcaatttcctgggcaattgtcgtaccggcttgcaccatttggccgtttttcacttcgtttttcacgattgttccatccatgatggcttttacgtcagcattttgctgtcctttaatttttgcaaccacgtcgtttttgcttacttctttcccctcatcaaggttccagtcagttactttacccgcagcaggagctgtgatagcagccatgtcgccggcaactttcgcttcatcggtttttacatagtgtgtgctttgataatagtagtaagcacctccgcctataattgcaagaacaacaatcaaaccgataatgttggtcagaattaaacgtcctctgttcattttgttttctcctttcgtttcttcctctatcattttgtggaatgatgataaaaatatgtggggatttttttattttccgtttttcactgcacagccgtttgcaagcttcgttaaactttccgcaagcttgcgcaggtactgcagttcagcggtattgagctgccggtataagaccgccgctttttcggcatattgaacagcagctttctttagaagttcttccccctcttcggttaactgaatcataacaacacgccggtcgtcgtgatagtcgctccgaaccattaggcggcgcttatacagaatatcggtcattctcgtgacagacgccggtttcagatcaagcgacaaagccagccttgaaagctgcgtgcttttgctcttatgtattttgaacatcagcagatactgcagcactgtaatatcaaaaggttcaagcactgtctccagaatcattttctgctttttgtaaatcgatctggaagtatcaaacagttgttcaaaactgagcaaagcgagctctgattcaatcaccgtattttcacctcattcccttaataatagttcacaagataaaatattaataaatgaaagaaggtttgtaaagagaaaagtttcattttttaaggattttttttatgccgttttttctctttatttttaatttaaaaaagccgggtgaagaaccgcggccgcacgattcttcactcggctttatatttaatacgatgctttgcttataccggcttcctcatttttaaaaaagcttttcagcgcttgaaatacgtccgatttctgtttcaggatgtagtatttaaatttatcatctttgacatttttataggcggacatgagggtggaatgcctgttatattgattgacctcaccgtaacagaacagattcgattttttcatgatgtcattgacgagctttacgcaccgggcgttatccgaagtcaggttatctccgtctgaaaaatgaaacggatagatgttgtagcgggcggggtcatatttttcatcaattaattcaagagacttccggtaaacggaggaacagatggtgcctccgctctcgcctttcgagaaaaaatcttcttccgacacaaccttcgcttccgtatggtgggcgataaattcgatatcaaccgtttcatactttgtccgtaaaaatcgtgtcatccaaaaaaagaaactcctcgccatatacttttcccatacgcccatcgaaccgcttgtatccatcatggctaaaacgacagctttcgattccggcttcgtcacatcattccatgttttgtatttcagatcttccggataaatagggtaaaacgacggcttgcctgtcatggcgtttcgtttataggccgacagcatcgtccttttcttatcgatattccctgtcagcccggttttccggatatcattgaactcgatatcggtatggacgatattgtccctttccttttgctgcagattcggcagttctaattcctgaaacagcgcttcttccagatccatcaatgaaacttccgcttcataataatcctcgcctgcctgatcgcctgctccctggccttttccggcgccctgctttttatctgcgccgtctcttgcgacgacatcgccgacttcgctgtcgccgtcgccttggccgacatgtttatttttatcatagttataacggattttatattcatcaagcgaacgaatcgggattttcacaacatcttttccgttggacataataatgctttcctcagtgacaaggtccggaaggttgttttttatcgcttcctgcactttcttttggtggcgctgctggtcgtcaaagcctttgcgatggagggaccagtcttcctctgaaatcaaaaaatttccgctgtcattacgggacatgaattcccctccttaaccgttatggtcgttttacatgtgtattccggcttggtcctgtttatgaaacaagtccggcgaaaagatttatttttatcttatgccggccggactctccaattgacaaacaattgcgaaaaacagacaaaagaacccgtccttttacagacgggcctctcaatgaaatcaaatatcagcggtttaacaagcttccgacatacttcagcagttcattagcgctagtcgaattatagccgtgttcatctattaaccttgccactacctcattgacctttttaagctgctgttcatccggcgttttggtggaggtcgtaattttcactacatcttttaagtctgcgaacagctttttctgaatcgcttcgcggagtctttcgtgcgaattatagtcaaagcgttttccttttcttgcataggcggatatgcggattaagatttcttcgcggaacgcttttttggcgttttctgaaatgccgatctgctcttcaatggatctcatcagtttttcgtcaggattcatttcttcacccgtcagcggatcgcgaagcttatttttattgcagtacgcttccacattatctaaataattgtccatgagagttttcgcggattcttcatatgaataaacgaacgccttctgcacttcctttttggcgatgtcatcgtactctttcctggcggcggaaataaaattcatataccgctctttgtcctcggcggagatggacggatgctggtcgagtccttcttttaaggaacgcagcacgtcaagcgaattgatggattccatattttttctgataatcgttgaggaaatgcggttgatgacatagcgcgggtcgataccgctcattccttcatcatggaattccttcttcatatcctccagatcaacggaattgtaaccttcaacgctttctccgtcatagagcctcatttttttgacgagatcaatatcagagcggttcggttccttcagccgggtcaaaatagaaaacatcgcggccacttttaatgtatggggggcgatgtgtacgtcagaaacatcactttcagaaatcattttttcataaatccgttcttcctctgacacctttaaattataaggaacaggcatcacgatgatcctggagtgaagggcttcgtttttcttattggcaataaacgagcggtactccgtttcgttcgtatgcgcaacaaccaattcgtcggctgagatgagcgcaaaccgtccggctttgaaattcccttcctgcgtgagtgacagaaggtgccacagaaatttttcatcgcatttcagcatttcctgaaattccatcattccgcggttcgctttatttaattcaccgtcaaaccgataagcgcgcggatctgattccgaaccgtattcggcaatcgtagaaaaatcaatgctccccgtcaaatcggcgatatcctgtgatttcgggtcagacgggctgaaggttccgattccggtacgtttatcctccgagaagaatatacgttcaactttaacatcctcaattctgccgccgtattcttcttcaagccgcatgacattaagcggagaaaggctgccctcaattctgatgccgtattctctgtagaagtcgtcgcgcagatgatggggaatgagatggagaggatcttcatgcatcgggcagcctttaatggcgtaaacagcgccgttatctgtcaatgagtaggcttcaagcccttttttcagcatggtgacaagagttgactttccgccgctgacaggtcccatcaatagtaaaatccgttttcttacatcgagccgcttggcagccgggtgaaagtattcctccacgagccgttccagagattcctcaaggccgaacagctccctcgagaaaaagctgtatgtctttttcccgtcatcctcctcgattccgctgtcttttatcatattaaaaacgcgagaatgagcagactgcgcgaccaatggattttcttttatgatctccaaataatcagcgaacgtcccttcccatttgagacgctgctcttcctctctgtacttttcaattttctttaatatatccataagaacctcctctatcatggttaatgcactagaaataaggtactttgttacaatctatgcggtgacgtgataatacatgcttttcgtttcttaaaaataaagacgttataaggccgtcattgacaagggtccggtgcaccgttcataatgaaagaaatacagtttcatccagactcggacatcaaatggaaaagcaaagaggaggagacatgatgaaaacgatcattttacttggggtcattctcacttttttagtatccatttttactgcgggttacgacagcaaacctgaaaacaaataacggcaaaagggtgctctttatgaagagcaccctttcctgtacaacataacaatgtttcatatttgaatatgttcttggacagttgatttttcatgagacttacagcttgtttgatactcgatttttccgattttgcagcccgggccgatttccacacgcttccctctgacgatgtccgcttccgtggattcgaggtaaattgcgtctccttcgatcaattcagcagaaagcatgccggctttccgtttaagaaaaccgggtttccgtctgacggtaatcgatgtgccgccgatttctttcacgcggcttcggtcataacgcaaatggatgtttacgtcccctgcgtttaacaatcccgccacattgatacatcctgttacatgaagcagctccgtctcgcaatcgccgccgacggtgagactgccttttatatgacactgttctcccgcggccccgccgccaatttcagcaagtcccttcagcctcatcctggcaaaacgcatggagccgccgactttcaatgtgccgatcacatttgctgaatgtgctgataaatctcctgcaacttcatgctctccgaaaattttcagcctgctgatctcggcatctccgagaaaaagtcccgtgccgaatatccggcagcgttcgctttgaagtccttcgccgacagttccttcccctttaatgcttacattttggtaggaaccgccggaagcgtgtccggctccgtacatttttaaatgactcaatttttttgtcgtttccattgcagctcctcctatcgtttcacgactttgttaaccaaagcggtaggatcacatgtaaaatcgccgctgtattccaccgtcccaatggtgcagcccgcgccgatccgcacatgatttccgcggactgtcttcgcgttcgtgtccgccaattcaatgatgtcaccctcaatcagctctgctgtcagcaccggggccggcatcagcttaaaacgcgtaagcacgctctttctgctcatcactttcaaatggcggcagccgatttctttcacatgactttctcccgcagccagcttcatactgacttcatcggcattcagcaggccgccgatcttgcatttgccttccgaacggaatgtctctgtctcgcaatcaccttcaatcccggctttcccggatatgaaaatatcatcagctttcacaccgccgccgaaagatgaaaatcccgcgacgttcagccgctccgttttgacatcacctttaatgacacccgttccgttgatacggatggattcagcttcggcactgccggaaattttccccgaaccgctgattgtcagtgtttgcgtcttgacatgtccgtctgtttttccgctgccgttaaacaaaaggctcgtgcactccacatcacctgacaccgtgccgctcccgttgatctccactgtatgaaaacggcctccttttgaacttcccgaaccgttaatgattaatttatctgttacttccattgatggtcctcctgcatccatttcgtttttaattcttccgatgccgcagcaagcgccacccgttcaaccactttgacagtcggttcaaataaaatatgttccgcgtctgcgatgaagcacgtcgttacgccgagctttcggagcatgacaagctccgtattcgctttcagctcggaagcctcatacgtcttcagcacccccgccgccaattttccttcctcaaggctgatattgcccgattgcaaaagcccttcaagcacatataaagacagcagcgcgcgggacgtgaatgtcacgccgtcttcgccataaacttgcagcgcggcttttgaaatcagtcccttttgaagcagttccgcagacgttatattgacatcagtcatttgcggagacagcatttctctcatttcatccagagacagattttctttcatttcctgtatttttgagatgcgttttaatatttccgctctcggaaaaaatgtttcctggcctgtaaacgtcgattttcggataaaccattcttcaggaattaaatttttccgtttccaccggtacagctgcccgtatgaaattgatgtttcttccagcaattcttttttagaaatcagttgttcctccatgaatccagctccttcgatgaacgtattgtaacataacactgttacgttgttaagcccggaaatataaaaatgccgtaaaccgctgctgcccgtcttttttattcaataaaaaaacgcccggatgcgggcgttttttctcacgtcaaatctctgtaattttgctggcgcagcgcttcatatacaagaatcgcggccgtgttggacagatttaatgatctcacatgctcggtcatcggcagacgcaggcagcggtccatattgttttcgatcaattctttcggaagtccgctcgtttctctgccgaatacgaagaaaaagtcttcctccgtatttgagtaatcaaatgatgtgtgcggcttttgaccgaattttgtaatgaagaaaaactttccgttttcatatgcttcaaataactcttccaatgaatcatgatatacgacgttgacgaactcccaataatcgagtccggcgcgcttcagcattttatcatcggttgagaatccgagcgggcggatcaaatgaagcgttgtgtctgttgccgcacaagtacgtgcgatatttcccgtattggccgggatttcgggttgatataaaacgacatgtaatgccacgatgttcacctctgttttttattccgcccaccattatatcattaattactcttttgtcgtatcatccgtaatatgaaaaaacgcatatctgatggaaggagtatacgccgttgaatcctcatatgaccaatatctcatcctgctgtcatacgtttgggcattgacgagcggcatattgcttttatcttttgcgaccacgatcgccgtatgattaaaacggccgtctccttcaaaatcatagcaaatgatatctccgggcatcagttcttcagctcttgatacttgcactgcgcgaagccctgccttggattgggccagatacatcttcatcgaatgcgcgaccgtccagctgtagctccacgagcttgccttcatccaccagcctgagcctctgttcggatgcccccgcatcggtgcttttccggcatgtaaacattgggaaataaaattggtgcaattatcgctgaaatttttataagcgggatttcgtttattccaaaacttctccgcgtactgcacggcagccagacggtcgtattgaaacgcccgcccgaaatcttcccgttcactccgctcatattcaattacgctgtttccgtcagaaaatccagccggttttttctttacttcccggtctttaatcaaaagctcatcatagagaaatgcagtccgttcctcaatctgctcttctaagtaaaggtgtccgtcatgctccttgcacaaatattcgaaatgaatcgtgtacatgacacataacgtgccgtcgtcctcaagactgcttttgacaatgacggcttttgccttcgctttcacgatatcaactttccgtttttcaaacagctctttttttctcgtcaggacctcaagatcgccggcctgcccattctgcctcatctcagttccgttgattaaataatgaagccgggcctccgctaaatcttcaataatatgcttcaagcgctccacccaccatacgattttataaagaaaaaacacttgaactccggccaagtgctttttctctatacatatgtcaggaccggccggttttagtcttctcagaaaccgataacagctccagtcccttttcaatttcccgtatggcgtcttcatcctgctccttttgaagcgctttttctaattcctccgcataatcaggatcaccgattttcccgatggcccaggcggccgtacccctgatgacggggcgcggatcttggtgcatcaaggccgttaattccggaagagacgaggcatctttaaaatgagccaaagctaaaatcgcattccgctgtatcggcttcttgccgcgccatgatcccgatacatgtccgaatttttctttgaattcgcggttgcttatggtcaaaagcggctttaacagcggctttgcgatttccggatcaggctccatctgcggatgaagatgaaaatctttccccttattaatcggacagaccgtctggcacgtgtcacagccatacagacggtttccgattttcgtgcggaactcatccggcaaaaatccctttgtctgggtcaggaacgaaatacagcgctgggcgttaagctgtccgggattgacgagggcgccggtcggacacgcgtctagacattttgtgcacgtaccgcacatatcttcaatcggcacatccggttcaaagggcagattggtgatcatttcagccagatagacgtaagaaccgtattcaggcgtggtgatcatgcagtttttggcgctgaagccgattcccgcccgttcagccacggccctgtcggacaattctcctgtatccaccattgactttgtgcggatatcctcatgtttgctttggagaaaattctccagcagatcaagcttttcccgcagcacatcatgataatccttccccaggaagctctgcaaaaaatgccgcgccgcccgtccctcgtgctcctcggcgcatctttcattttggaaggataagcaagggcgatggcgacgattgatttggctttcgggagaagcaaagacggagtaacccgtttttcaatatccggctcttcaaaaccggataaatagccgagtgattcctgaagaatcagccggtcccgcagactgtcgaacgtatcagccgttgtaaacccgattttgtcaactccgatgcttttggcgtattcgattaattcctctttcagtttatgaatattcattttttgcacagcctcctttctttgtgatcaggctcccgcacgggtataatagagttttatcatcccgaaatggagtgaacacacttgaacatcagtttagatccacttattgctgaacgggtgccggggatcaaagcggcagccgtcttatatgaacagatcgaagtcgggcctgctccgcaaatgctgaaaggccgcctccgtttatttcaagaatctctttactttgattatgctgacggcggtatagatgagcagccttttgttaaagagtgggcgtgtataatggaacagctcagtcccgccttttcaggacaaaaaacgccgatggagcttatgctcggcgatatttcccgggaacgattcattgaaagtgtgaattcagcccatgataccatactttttttctccttgaaatattcattgcctatcatggcgtatgacgccgcagaaatagatgaaccgatttcgattacaatcggagaaaaagaacacgtacttgctttctccgactctggcggcattttcggcggccttaccggacatatcaacacccgccctgtaacaatcggcacaaagaaaatgctgcagctgatctttttcccgccttcatttcatgccgacgcggcggatgagctgctatcatctttaaccaaaatgtttgaacaaattcacggaggcacgcataccgtctcttggctttcataaaaagacacgccttcgtgtcttttttcacataaaaaaacgcaatacttcgtttatcagagaaacgaaacactgcgttaataacgtatgtatggagcgggtgatgagaatcgaactcacgacatcagcttggaaggctgaggttttaccactaaactacacccgcatcaaagttttttgtcagtaccgatttgatgtttctaatattacatgtatatttttttttcgtcaagggaatgttaaaaaatttgtcgaaaaaaattcttttttcgtccacatgttaagttaggtttacattttgttaagaatctcatacaatataaaaaagaagaaaacttgaggtacgccctgatgatgaaaaataaagtaaaagagctgagagccagattcggctattctcaggaaacgctcggaaaagaagccggagccaccagacagacgattgcagcgattgaaaaaggagattatgtgccttcactcttattggcgcttaacatctgccgggctttctccctgccgatggaggaagttttctggctggaggaggagaaaaaatgagtttgaaaagaaaagcgtgttttcaccttgcactctacggattggcctgctggacgcttatttcctttatggaagcggcgccgcggatcgctcagtttttccaaacggaggggagcggtgcatttgagctgaatatcactccgtttctgctgtttaccgtttgtgccgcattgtatatctatgccgaaaagaaaaaacgaaacggcaaaaagcataggctagtgcccgatgaatttgaggaacaggatgaaagagaacgaatgatgacggctaaagcttgccgttcctcgtatatcgccgtttacttctcattgccggccgcagccgttctgcttttgttttatccgctgattcagccgcatctacctttttttccgattcttttgattttcattctgatgatgattcagcatttggcttatgttttcacttttcataagcacggcaaaaactccggttcatgacagatccggagttttttatgttaccagctcgcttttttcaccccgggaacccggcctttatgggccagctccctgaatgcgattctggacagtttaaattttctcatatatccgcggggccgccccgtcaccgtacagcggttatgaagcctggccggagcagaatcacgcggcagtttgctcagcgcttcccagtcgccttttgcctttaattctcttcggatgtccgcatattgttcaacaagcttctgccgcttgagctctttgattacttttgatttttttgccatttcagcactcctaacaaatcgtaataattacgttttgtatcatatcatccagatgagcatcgtgcaagctaagcgcttaaaaaggcgggtgaatacccgccttcactgccggcatttccccggaaatgaatccgcagaaagcgcccgccgtcaatgatccgccttgcgacgtcatcagactgtcgctttatttcctcttgcaaaatggtcgtttcccattgcttcacccactctgcgctcaagcttgttagtccgttcattctgaaacggcagaagcggaaacacgagttcagccagataataagcttcttccagatgcggatagcctgaaaagataaacgactcaatgccgagtgcctgatactctaaaattcgatcagcgacagtctgcggatcaccgacaagcgccgtgcccgctccgcctctgaccagtccgatgccggcccagagattcgggctgatctcaagcttcgagcggtcaccgttatgaagatcggccatccgtttttgtcccgatgaatcagcgcgccggagcgcagcctgcgctttcgcaattgtctcttcgtctaagtggctgattaatcgttcagccgcttcccatgcctcttcctcagtctcccggacaatcacgtgaagtctgatgccaaaacgcatcgtccttccttccttggcagcctgttttttaacggtttcaatcttttcttttacctgctccggcggctctccccatgttaaatagacatctgtatgtttcgcagcagcctcaattcccgcctgtgatgaaccgccgaaatataatggcggatgcggagactgttttggcgggaacaggaggttgctgttttccaccttgatatggtccccttcatatgtcaccgtttcgccccgcatgagtccgcgccagacggttaaaaattcttcagtcgccttataacgttcatcgtggctgataaacatgccgtctcccgccagttcataaggatctccgcccgctacgacatttacgagcaaacggccgtctgacagccggtccattgtcgacgccattctcgcggcgacagacggctgcatcagtcccggccggaccgccactaaaaatttcaagtcactcgtttcccccgctaaagcggcagccgtcagccacgggtcttcgcatgatctccccgtcggcagcagaacccccgtatacccgagtctgtccgccgcctgtgccacttgcttaaaataaagatgatccgccgttctccctcccgtttgcgtccctaaataccggccgtcaccatgcgtcggaataaaccaaagaatctccatatgaatctctccttttttaataggttacccttcataactgttccgccattttaatagtttccgttcgagcattctgaccaatgcatctgtcagcttgccgacagccgcaaaaatgataatgccgacaaacaccttatttgtctgtgaaaattgtctggcatccataatcatataaccgacgccctcgctcgatcccatcagttccgccaccacgagaccgagccacgcaatgcctagggagagcctgatgccgagcaggatattcgggagagatgccggaagaattaatttcgtcatctgctgataccaattaaattccagcacccgcgcgacgtcaaacagcttcgcgtccacactgcggattccgagaaacgtattaatgtatacgggaaaaaaagcccccaatgcgatcagcagaattttagatgtctcatcaaatccgaaccacaaaatgaacagaggagtcacggccaagtgcggaaccgtcctgagcatttgcagagacggatcaaggtatgcttccgtccgctttgaaaaaccgaccagcagcccggaaacaagtccgaggcccgcgccaagcagaaatccggcagccgcccggtataaactgatctctaaatgaccccaaagctcacctgaaagaagaagttcctgaaacgtctgcaagatgacgacaggcgacgagagcaccgcggccgagacgatgcccagacttgcgataaactgccatactgcgatgaccgcagccgggagtacaatccctttcatccattggtatgaatacttccgggatcttgccagagctttcttttctgattggcttattgcgccggcagccgttgatgcttctgctttcattacttgccatcccccgtttcaagcgcttttttaataaatgaattgtcgacaacgtcttttacatgaattttcttatgaatcgcttttgttcgatattgaaaatcagcggtttcctgctgggctttgacaatatcatcatcgatcggttcattgagaggctcagtattgttaagcacgtttctgacgactttcggatcaagatgtttgattttcgcatataaggagacggcttcatctttgtgttccttttgccatgtaactgctttattgaacactttcagaaaacggacaacctcatccgggtgttctttggaaaatcccgttctgactaatgtgaaaccgggagaatataaatctgtgctttctccgttcgccaatatttccgccccgtgctgcagcgtttcaatcgacaaatacggctcccaaatggaccatgcgtcaactgatttgttttcaaaagcggaaaccgcctcatcgggctgaagctggatgatggtgacgtcatcggcggaaagccccgctttatctaaagctttatagagaaaatcaaagccgctgctgcctttggctacggcgatttttttacctttcaattctttcaggctctgaatcccgctgcccttgtttacgagaatgccgtttgcctttaacccgtcctgagacagcccgatctctttaaaatcaattcccgccgcctgaccggaaatgaccggtgaattgccgacctgggaaaaatcaagcttatcggcggcaagaccttcaaattgcggaggaccgctttggaattcgacccattttacttttattccgtcttttttgaaggcctcttcaaaccagcctttttccttggcaatgagaagcgggcttaaactctgctggatgccgatccggatttctttcaccgttttcccgccccctcctgtcccgtctgcactgcatccggctgacatcatgactgctgcggctaaaagaatgatgatttttttcacttcgcttcgtcccttctatattccggacccatccgcaaaccggaggtcttccgttttctcaaattcagaaagcaccttctgccggacggcctgaaaatccgctgacgtccgattgcgcggatgcggaagctgaatcggcatcaggctgtgcagccggccgggctttgccctgaggatcgccagcttatcgcctaaatagacggattcatcaatatcatgcgtgacaagaatcatcgtcgtttttttctcgcgccatatatcaagcagcacatcctgcaaatgttttctcgtaaaagcgtcaagcgccccgaacggttcatctaaaagcagcacctccggctcacgcaaaagggctctggcgatggcaacccgctgcgacatgccgccggataattcgcgcggataagcgttctccgctccctgcagcctgacaacctcaatcagatcatccacttttttccgaacggccgggtcgttcatattgagatcggcagcgatgttttgttttaccgtcagccagggaaacagccggtgctcctgaaagataaatccctgccggatgcccggtcccgacacattgcggccgtttattgcgacagagcctttataatcggtatcaagaccggcaatcaattttaaaagcgtgcttttgccgcatccgctcggtccgatgacagtcaaaaattctcccgatgcaattgacagctcaatatcattcagcaccggcgttttccggccttcatgctcaaaagctttttcttgtatgctgatggttacagccatctgtcttcccctctctttctgccgcatgcgatcgaaaaacaaaaaggcccccatctccgattgcttgcagagatgggagccttcggcggtccgatcggcaacccgtttgtttttaaatttgaatatcatgttaattcaaattattccgacttgtcaactgttttttgtatgaattaaaaatgcgccttccggcataaacctgccaaagagcgcatcggctgtatcacgtatttacttccttttctttccgggcgattttcaataatgtctgcgcgttgttgccgaaaatgttttctatatcttcttcccgcatattgatttcccggcaggtcctcacctgctcctgaagatatctgtatacatatcctctcggaaatccgttcgaatccgtcccgaagatgatccgttcagcaccgattaattcagatgtctttcgaaacagaatttccaaatcaagccggtacggcatccacctcatccactgatttgagccggacgtgtcaatatacacattcgggcagctccagcacagctgcagcagttcctgataatatccggcgccgaaatgcggaatgatgaacggtatatcagcatactctctcgcgacgcgatagatggagagcgggttgatgttgcgatggctgacaatgcccccgctctccctaaaagtccgaagtgaattaatacaggcagtcttttgtcagccagatacgtccacagctttttcagcgacggatcatgaaactcgatgtctgtcagcggcccgaacagtttatatcctttcagaccgagctcttcaaccgctcttttcagctcctcatacgcatccttttgttccaaaggatgatatgcaaatccggtaaacctcgcgggattggcttgaataaacgccgccatccggtcattgctctctgctgttaaaaaattcagcacgtcaatgccgtacttatctaattctttctcccatcttgtcatcaaagcgatttcgccgtcatcgccatcaacatcatgcggatcaggaaaatcccaagtgagattcattctttccgaccgctcccggttataatcggaaaatgtcttatcgtttttgccgaaattaaggctgtacggcagatgaccgtgaatatcgacaggtttaaaatgctgccggaaaagcatacaatcgccgcctcccttaccgcctgacaataaaaaaaggcccttatccagtgaagaataagagcctcttgtgtccaagtcagcggtttctattttttctcatattaaacccattattcccgtcagtcaagtgtgttattaaacccataccttcttttcgataataaaaataattattttataatcattataaaataatattgactttttactgataggtgatattatgttcttataaatttaaagaggtgatcacatgagttcaaataaactgacaaccagctggggcgctcctgtcggagataaccaaaactcaatgacggccggcgatcgcggtcctgctttaatacaagacgtccatctgcttgagaaattggcgcactttaacagagaacgcgttccggagcgtgtcgttcacgcaaaaggcgcgggcgcacacggttattttgaagtcacaaatgacgttacaaaatatacgaaagccgcatttctgtcagaagtcggtaaacgcacgccgcttttcatccgtttctcaaccgttgcgggcgaactgggctctagtgacacagtgcgcgacccgcgcggatttgccgttaaattttatacagaagaaggaaactacgatatcgtcggaaacaatacacccgtgttcttcatccgcgatgccatcaagttccctgactttatccatacacaaaaaagagatccgagaacacatctgaaaaatccgacggccgtttgggatttctggtctttgtcacccgaatccctgcaccaggtaaccattctgatgtcagaccggggcattccggcgactcttcgccatatgcacggattcggaagccatacatttaaatggacaaatgataaaggcgaaggcgtctggattaaatatcactttaaaacagagcaaggcgtgaaaaaccttgatgttaatacagccgcaaaaatcgcgggcgaaaatcccgattaccatacggaagatttgttcaatgcgattgaaaacggcgatttccccgcatggaaattatatgttcaaatcatgccgttagaagatgcaaacacatatcgctttgatccgtttgacgtcacaaaagtatggtctcaaaaagactatccgctgatcgaagtcggccgcatggttctgaaccgcaatccggaaaattactttgcggaagtagaacaggcgacgttctctcccggcacattagtgcccggcgtcgacgtctcacctgacaaaatgcttcaaggccggttgttcgcataccatgacgcgcatcgctaccgtgtcggcgcgaaccatcaggcgctgccgatcaaccgttcccgcaatgaagtgaaaaactatcagcgtgacggacaaatgcgttttgatgataacggcggccgctccgtctattacgagcctaacagcttcggcggcccgaaagagtcacctgaagataaacaggcggcataccctgtatcaggtttcgctgacagtgtaagctataatcatcatgatcattacacacaagccggcgacctgtaccgcctgatgagcgaggaagagcgcgcgcgccttgtcgccaatatcgtcagtgcgatgaaacctgtggaaaaagaagaaattaagctgcgccagatcggccacttctacaaggctgatcctgaatacggcagacgcgttgccgaaggactcggactgccgtcaccaaaataacatcaaaaaacctgccggtctgcccggcaggttttttatgttcattatcaataaaaccgtttttttctcaattacacgaagtggcatgccgcaaaatgatgaaaccctttttctgacagcgccggacttttctcagcacatatcttcttggctgccggacatctcgttcggaatttacagcctgaaggcggatcagaggggcttggtatatcaccctttaaaattatccgctcccttttcgctccgggatcaggaacaggcacggctgataacagcgctttcgtataagggtgaagcggccgtgaaaagagctcctcctttgacgcatattccacaatcgtccctaaatacataatggcgaccttcgtacataagtgctccaccacgcttaaatcatgagaaatgaacaagtatgacagcccgtgctgtttttgaaggctgctgaacaaattgatcatctgcgcctggatggagacatctaacgccgccacgggttcatccataatgataaattgcggtttgagcgccatcgctcttgcaatcacgatccgctgccgctgccctcctgaaaattcatgcggataacgatcgatgaagtttgcggaaagtccgcaggcttcaagaacctccgccgctttatcacgcgcattccgcttcaccgccaattgatgctcgatcatcgcttcaccgatggcttctccgatccggcgccggggatttaaagaactgaacggatcttgaaagatgagctgcgcttccgatctgaaagttttgagctcgcgccggctcatccgaaacacatcacgcccctgaaaaaacacctctccccctgttttctcatgaagcctcaaaatggtcttgccgattgatgactttccgctgcccgattctcccgctaagccgaacacttctccctttcctatcgtaaaactgacaccgtcaaccgcttttacgggttttttatgagtctttctcatccccccatgctcctcgtaatattttttcagccccttgacctccagcaacacatcactcatctgctttctcctctctgtaaagccagcacgccgcctgatgccccttcccgaattcagtaaaatgcgggctcgatctccggcatatttccgtgctgtgttcacatcgctccgcaaaataacaagacgatcccgacaggtccgcaagctcggggacctgccccggaatggtgtaaagcgtctcccttttttgaccgataaccggcttggccgcgagcagccctttcgtatacggatgcttcggatcagaaaacagctctgcaaccggtccttcctccacaatttttcccgcatacatgacaatcacataatcagccatttcagcaaccacgccaaggtcatgagtaatgaataaaatagacgtgcgaaattgctttttcatatcccgcaataaatccaatatttgcgcctgaatggttacgtcaagcgctgtcgtcggctcgtcggcaatgatcagtttcggatcgcagcttagcgcgacagccgtcatgatgcgttgcagcatgccgccgctcagctcatgaggatatcggtgcataacctgctcggcattcgggatctccactaacgtgatcagttcaacggctctccgccatgcctctttcttactcagcaacaaatgttcgcgaatcggttcggtcagctgctcaccgattgtaaacaccggattcaaagatgtcatcggttcctgaaaaatcatcccgatttcgcttccgcggattttctgcatgtcttttggtttcagttccaacaggttctgtccggaaaaatgcaccgctccccgttcgattctccccgtctcgggaataagctgcataatggacaatgacgccatacttttcccgcagccggactctcctacaatacaaaccgtttcctcctcatgtatcgtaaagctgactccgtccacggcctttaccgcaccctcctctgtataaaaagccgtttccaaatgccttacttctaaaagcggttttttcatttcattttcacctgccgttttaccttaggatcaaaagcgtctcttaaaccgtctccaagcaaatgaatcgccacaacggtcagaaaaatggccgttcccggcggaatccacagccacgggcggagtgtaaaatccataaaatgattcgccgcttccatcatgtttccccaagaaggtgtcggcggagcaacgccaagcccgagaaaactcagcgcagattcactcagcatcgctcccgccacatgcaaagtcgccgctaccagtaataacggcaatgtgttgggaagcaaatgatagaggattttccgtttatcactaagccccaaaacttccgcggccatcataaacagctgctccttcagcgacaaaatctgtccgcgtacaagccgcgccaaaccgggccatccgatcaggcttaacatcatcataatcaggtacattctgtattcagaaggcactttccactccgacatcaccgcagccaaaatcaaaagcagcggcaggcccgggatggacatgagcatatcagcaatgcgcataatgatcatatcagcggctccccgataaaacccggccgcagccccgagtaaagagccgatgacaagcgacagcaccattgaagcaagccccacggtcagagaaatctgccccgccagcatcagcctcgtcagcacatctctcccgtactggtcggtgcccagccagtgatggattcccggatgctgattggcatttgaaatatccgtccgatctgttatgtacggagaaaaagacggcccgataaagcacaataaaaacataaaatataagaaaagaagactgatgaccgtcagcttatgctgcagcaggcggcggtacgtctgcttccaaagagaaggcggcacctctttttgttttttcattccgaacaccccctatttcagtctgacccgcggatcaaccgcggcataagcgatatccgccaagaagttccctacaatcgttaaacaagacaaaaacaaggtaaacgccatcaaaaccggataatcacgataatgcacagattcaagctgaatacgtccgacacccggccacccgaaaatctgttcaataatgatggctccggaaaacagtcccggcagttcaaaagcaagcagggtgatggccggaataagcgcgtttttcaacgcatgtttccagatgacggtgcgctctttcaatcccttcgctctcgccgttctgatataatcctgtctgatcacgtccagcatgccggagcggaaataccttgtcagcgagccgatgccgagcatagataaaatcacgaccggaagaatcatatgtctggcggcttcaagcacgtacgaaaaacctgtactcgtgctgccggtatcaatcatcccgccgacgggcaatattttcaaatccaccccaaaccacttaataaacagaaggctgataaaaaaagacggaaacgccatggaagcaaaaacaagaaacgtcacgatcccgtcaaaccatgagtatttcctgacagcggatatgacacccgttatcatcgcggctgaccatgtaacaagcaacgccaaaaacgcgacaaaaaacgaattccagacatatttccgaagcagtgacaggacgttctcctgatatttcaaagaaaacccaaaatctccgctgagcacatttccgagccatgtcacataacgctgccaaatcggctgatccagcccgtaaagcgcttttaactccttcgctctttccggagtcaggtttacattggaatcaatatagtcgcccggcagcatggcgaataagaaaaaaataataaaggacgtaccgaataagatcacaagcatttgaatgaatcgttctgcggcataccgtttcataaaaagcccctcctttccgctgaaagggcaaaatccccaggatgcatcgggtattttgcccaaccgttctattgaattgagacatttgagagacttgaactgattccagaataattgtcagcctcaagcccttttatttttccgctgaccgcccttgcgctctgacggtaatgaatcagaatgtaaggcgggttttccccgagctcccggtacagctggtgataaatctcttttcttttgctgatatcaagcgtgccggctcctttctctatcagccggtccgctttcggattggaataccccgtcacattattgggatggccggaagccagcttttccaccgtgtcattcggatcaaggatctgcgaggtggaaacggcggcaaggtcatattgtttgtcattgattttcgctacttctgtattaaaatccatcacttccggttttaatgagattccgatgtccgcataattttctttcgctatcgggatgaaatcatcatccgctttagatgtgtaatagctgatttcaagctttttgccgtttttttcacgtacaccgtctttgcccgttttccagcctgcttcgtcaagaagctttttggctttttcagggttaaacgcataccgattgacacctttgtcatcataagcccacgaaaccggagacaccggaacattcgcgacctctccgtagcgtttaaagcggacatcgacgattttttgacggtcaagtccgtaaataagcgcctgggacactttcttatcttgaaaaggcggacgcttgtgattgacgtacacaagcccgtaatcattcacgacagatacgcttatattcgcaaaaccgagactttttaaatgctgaaccgtatcatcatcaggtgagaaagaagcgtaatcaaggtcacccgtttcaaacagctgaagggaagttgacggatcgataattttataaatcagcttttccgttttcggttttccggcataatagtgttcattagcctgatagcgtatttcctgtcccggaaggtattctgtaaattgataaggtcccgctccgagcggtttggcataaagctcttttaaatagtccagtttgccgaattgatatttcttcccgtagtaggcttctgacagcacctgcccgcccaaaagaagcagcgacttcgcactgactttctcagtcgtgatttgaatggttctgtcatcaaggacgcgaatgccctctatcgtctttgcctttccttctttgtaagccttaccgcctttaatataagccgtggtgatatcttcatagcccgcgtatgcaggatcatgcagcagtgttaaagtgaatgcggcatcctttgcggtcagcggtgaaccgtcgctgaaaacgagattttttcttaaacggaacgtgtatgtaagctgatctttggaaattttccagctttccgcaagagccggggcaggcttccccgttttatccagtttgactaacggttcaaaaataggatctgtcgcatttccatcccagccgttttcgtaaaagtacggcagaaacacgccgcccggcgcggaaatcccagcaacaaaagtgtcagttctggctttcgatttagcgggaatcgccgccggatgagaagctttaaattcctttgtcttgacatgggtgatacgtgtttcttcctttttatcagccgcagatgacggttcttccccggcactccctaacgcgcaccctgataacatgatggataccgacagcgcgagtaccgttgttttcaacctccattttctctccttcatctttatcgaacccccgcatgcttttcatctatctttatataaatctgctccatctgttcctcatttctcataatctcccgtttgtttttctctacaagcagttcgaaattcaatgtgtgttttctgtactttttccgcttttttctctttttgcgcacatgtgataccttttttaacgccacttttcatccctccgcttttcatttaatgactttcacgcaaaaaaggcccttatctgtttaatagataagagccttcggtgatccgatcagccatcgtttggaaatatgtaatgattatgttaattcatacaatccctacctgtcaactacaatttaaaatatcgtgtccttccgggggttttcctcatacactctctcatttttccgcatatgctagaaaacatagcagattacaagtgaaagtgagtgagaatgtggaaaagacaacattgagcggtcgcatcgtcaaaaaagatgacccggactataatgccgcaagaaccaatttcaatttaagcctgcaaagatatccagacatcattgtgttttgccaaaacaaacatgacgccctcaatgcggtgagatgggcacgtgagaacaatgtgcctttccgtatcagaggcggaagacacagctacgaaaatttttccctgttaaatgacggactagtcattgatctcagtgaaatgaagaaaataagagtaaatgaggataagcggctggtctcgattgaagcgggagccgaattaggggaagtctaccggacactctggcggtacggcttgacccttcctgcgggaaccattgcgaatgtgggaatcacggggctgacgctcggggaggaatcggatatttaacaaggactgccggacttacttgcgatcgtctcctccagctcgaaatgatcatagcggacgaaaaagcgggtgctgacttgatcacagtcaaccgctcaaagcactctgatctattttgggcatctcagggcggagggggaggcaacttcggcattgtcacatccatgatgtttaaagccgtgccgatctcgtgcgtgtctgttttttctgtcacttggggctgggatgatttcgaggaagtatttaatacgtggcagcgctgggctccatttacagacaaccggcttacctcatcaattcagttttggcctaaggaagtcaaccgcatagaagcactcggtcaatttaccgggacaaaagaggagctgaaagaactgctggctccgttaatgaaagcgggaaaaccgacaagcggcatggtcaagacagtgccatttattaaagcagcagccttttttaacagcccgggaggcaatcagccgcaaaagatgaagcggtcaggatcctttattgaaaaaccattatcaacacgcgcaatatccactttaaagcgctatttagagcacgctccgaacgaaaacgccagtgtctggcagcaatctctcggcggggcggccggacggatcgctccggaccaaacggcattctactatcgcaacgcaatcattgcccaagaatatattacaacttggacatctgctgaagaagaaagacaaaatgtccgctggatcgaaggactgagaacgtccctatcaagagaaacgatgggagattatgtgaattggcctgatagagaaatcagaaactggctgcaaacgtattacggagaaaatgttcaccgcctccgtcaagtcaaaacgaaatatgatccggaaaatatattccgcttcgagcagagcattccgccgcttcgccgttcaccgtttttctaaaaaagatgaagatggatacactccatcttcatcttttcttttattgatataagcggcttcccttctctgcaaactcttttgctttttctttcagcccttcattgacggcctcgtcttcagtaagtccgttttccttcgcataatcacgaatatcctgagaaattctcatgctgcagaacttcgggccgcacatcgaacagaagtgagccgtttttgcgccttcagccggcagcgtttcatcatgatattccattgctctttcaggatcaagcgacaaatgaaattgatcacgccaccggaattcaaaccgcgccttagacagagcatcgtcacggatctgtgcacccggatgccctttagcaaggtctgcggcatgtgccgcgattttgtacgtaatgacgccttctcttacatcatcacgattcggcagccccaaatgctccttcggcgtgacatagcaaagcatcgccgtcccgtaccagccgatcatcgccgcgccgattgctgaagtaatgtggtcatagcccggagcgatatccgtcgttaatgggccgagcgtgtaaaaaggcgcctctttacaaatttccagctgcttgtccatgttttccttaattttatgcatcggcacatgacccggtccttcgatcatcacttgcacatcgtgcttccacgcaatctccgtcaattctccgagagtctccaattccgcaaactgcgcttcatcattggcatccgcaatcgaacccggacgaagcccgtcaccaagtgaaaaagcgatatcatagctcttcatgatttcacaaatttcttcaaaatgcgtgtacagaaagctttcctgatgatgagccaggcaccattgcgccataatcgccccgccgcgggatacgattcccgtcgtgcgtttagccgttaacgggacataacgaagcagtacgccggcatgaatggtgaaataatccacgccctgctccgcctgctcaatcaatgtgtcacgataaatgtcccacgttaaatcctcggcaatgccattaactttttcaagcgcctgataaatcggcaccgtccccacaggcacggggcagttgcggataatccattcacgcgtcgtatgaatgtcttttcccgtggataaatccatcatcgtatcagcgccccagcgaatcgcccacgtcattttttcgacttcttcttcgatagaagatgtaacagccgagttgccgatattggcattaattttcacatgaaaattccggccgataatcatcggctcgctttccgggtggttgacgttagaaggaataatcgcccggccgctggctacctcgtctctgacaaattcgggagacacatgctcgcgaattgcgataaactccatttccggcgtaatgatgccttttctcgcataatgcaattgtgttacatttttccccggcttggcccgaagcggtttccgctgcaggccggggtattcggcagcatgatcttcttttttatagccgttgtcttcaggtctcacggtccggccgttatattcttctacttctccgcgcccggtaatccactttgtgcggagcgcccccagaccttcatgaatatcaatctgtacatccgggtctgtatacggtccgctcgtatcataaacacggaccggcgcattctcctcttccccgaatgcccccgtagtcgcactcaggctgatttcccgcatcggcactcgtatgtcgggcgaagaaccttctgcataaacctttttactgccggaaaaactcgacataatggaaatgttcgcttgctgtactgattgattttgcatacaaatctctcctttatcatttgaataacagaaccaagctcagcaccagcacaaaaaaaccgggttcaaagaagaacccggttttgcagtcagaaagaaactattattgttttcctcaacaataataaaacctttacttccccacgctggtacgaaccagatcaggtccaaagggttaagaagccgccgcttctctctcagcccgctcagacgggcacccccagtaactattgatttcgctctcatcgtaacataagttgtgtacaaaaaaaagcatattatcaaaattcagataacggaatggtcataagctctgtttcccgaacgccttcttcggtattaaaaacccgataaccctttgcggtttcccgggaagagacagcccggaacagctgaccgtctttataatgaagcgcagcgccgtcatcagcggcatagccctccctgagtatcttttcggaaatcagacggtgatacaccggccggcgctccgcttctccgtcatagtgcggacaaaagctgcccggcaaaaatcctaaagctgttaactctcgcaaatcccccgctgaatccgtcaccccttcttcataccagcaaatcgctccggcgctgagacccgctaagatgatgccgttttcccaagcctcacgaagaataaggtcaagcccccactctttccataagacaagcatattgcgcgtatttccgccgccgacatatataatatctttcttcatgagaaaggatctgagatcagaacccggcggtttaaacagcgacaagtgatccggctcacaccgcagcttttgaaaggcctgataaaacctgccggtatatttctccgaatctccgcttgccgtcggcaaaaaacaaactttcggctttgaccgcgccgactgctctaaaatatactgatccagcacaagatgatccggctccatggaaaaccccccgccgcccattgcaataatctgcttcaatgtcatcacttctttttttctcaagtataacagctcattaaaaaggcgttatctcaatttcggataacgccttcaaaaagtatttgttatctgaaaaatacgcaccgtataacacaacggagatccccgcggcgttaatcgccggaacaagcttcgaacgggcatacttcgcaacattgatccccaacaccgtattatcactgaggggagaagcaaaccaaatgttccgctcgctaataataagctggtatgtaactgaaccgccagcgttacgccgagcgccccaagtccccaggatgacccgataaaatgggatataacagcccccagtataaaaagagacggcgcaataaacatatgagggctccatgatgttaaatgagaagtaacatatttcgagaatcccagattttcagctactgctgttacggcccaaatcagcgataacataataataacgttgaccaattcgtttccgcccttaataaaatgggtaacaagctcgcctgcaggaaagcgctgaaacataaaaagagcaaatactgcaataaccgctgccaataatgcgcgcttttgaatggccgccccaccagctgagaaacagtgttaatagcaaaaacagcccgatcggaaagatttaactccacggccgaatcggtgtttccttaatataagcacggtgcgccgaatccagctcctcctactgcaggtatcatgttttcacaagccttggagatattttcatacaacaaaaaaggcttctacaatatgtagaagcctttgtataccggtggccggggtcgaaccggcactccagaaggaacacgattttgagtcgtgcgcgtctgccaattccgccacaccggcatataatgcgtcgtgttcaaccgacgtatataaatataacatgcattctataaagagtcaatggttttagtaaagttttttcaaatggtaatgcagtatatacgatacaagcaagaaacttatattgatagtcttcacgcttttattatataaaaaaagcgacctgcaatatgcaaatcactctcatatatgttttataataagaaaattgatgaccaatttaacataattcgctcaaagttaaattggtgccgagggccggacttgaaccggcacggtagtcacctaccgcaggattttaagtcctgtgtgtctgccaattccaccaccccggcaatagaaaggcgacacccggattcgaaccggggataaaggttttgcagacctctgccttaccacttggctatgccgccgtaatttggagcggaagacgggattcgaacccgcgacccccaccttggcaaggtgatgttctaccactgaactacttccgcaacatgtaaaagaacttaatacatcttatgctgttgttttcaaaaaaatgcaactgggctagctggattcgaaccaacgcatgacggagtcaaagtccgttgccttaccgcttggctatagcccaatgataatatggggcgattgatgggaatcgaacccacgagtgccagagccacaatctggtgcgttaaccacttcgccacaaccgccataatctgaagatgaataaataatatagtggcaggggcagtaggaatcgaacccacaccggaggttttggagacctctgttctaccgttaaactatgcccctatttataaaatggtggaggggggcagattcgaactgccgaaccctgagggagcggatttacagtccgccgcgtttagccacttcgctacccctccatcatttagagtgccggccagaggacttgaacccccaacctactgattacaagtcagttgctctaccaattgagctagaccggcaaatggtggctcgggacggaatcgaaccgccgacacacggattttcagtccgttgctctaccaactgagctaccgagcctttttataaatggcggtccggacgggactcgaacccgcgacctcctgcgtgacaggcaggcattctaaccaactgaactaccggaccatttttttggttgcgggggcaggatttgaacctgcgaccttcgggttatgagcccgacgagctaccgaactgctccaccccgcgatgataatggtggaggatgacgggctcgaaccgccgaccctctgcttgtaaggcagatgctctcccagctgagctaatcctccatcatataagtgacccgtacgggattcgaacccgtgttaccgccgtgaaagggcggtgtcttaaccgcttgaccaacgggccctggtattttttcgtttgttatgtattgataattagtggcggagagcaagggattcgaacccttgagacggggttaccgcctacacgatttccaatcgtgctccttcggccactcggacagctctccataattggctccgcaggtaggattcgaacctacgaccgatcggttaacagccgatagctctaccactgagctactgcggaatgaagtctgcctggcgatgtcctactctcacagggggaaacccccgactaccatcggcgctgaagagcttaacttccgtgttcggcatgggaacgggtgtgacctcttcgccatcatcaccagacgttttagtgacatgtattattatactatgtatttcggaaaaagcaagagtttttttaaaaaattctctcaaaactagataacagtaagcatacattcaaattggttaagtcctcgatcgattagtatctgtcagctccatgtgtcgccacacttccacctcagacctatcaacctgatcatctttcagggatcttacttccttgcggaatgggaaatctcatcttgagggggcttcatgcttagatgctttcagcacttatcccgtccgcacatagctacccagcgatgcccttggcagaacaactggtacaccagcggtgcgtccatcccggtcctctcgtactaaggacagctcctctcaaatttcctgcgcccgcgacggatagggaccgaactgtctcacgacgttctgaacccagctcgcgtaccgctttaatgggcgaacagcccaacccttgggaccgactacagccccaggatgcgatgagccgacatcgaggtgccaaacctccccgtcgatgtggactcttgggggagataagcctgttatccccggggtagcttttatccgttgagcgatggcccttccatgcggaaccaccggatcactaagcccgactttcgtccctgctcgacttgtaggtctcgcagtcaagctcccttgtgcctttacactctgcgaatgatttccaaccattctgagggaacctttgggcgcctccgttaccttttaggaggcgaccgccccagtcaaactgcccacctgacactgtctccccgcccgataagggcggcgggttagaaggtcaatacagccagggtagtatcccaccgatgcctccaccgaagctggcgctccggtttccaaggctcctacctatcctgtacaagctgtaccaacattcaatatcaggctgcagtaaagctccacggggtctttccgtcctgtcgcgggtaacctgcatcttcacaggtactataatttcaccgagtctctcgttgagacagtgcccagatcgttgcgcctttcgtgcgggtcggaacttacccgacaaggaatttcgctaccttaggaccgttatagttacggccgccgtttactggggcttcaattcgcaccttcgcttacgctaagcgctcctcttaaccttccagcaccgggcaggcgtcagcccctatacttcgccttacggcttcgcagagacctgtgtttttgctaaacagtcgcctgggcctattcactgcggctctctcgggcttgcaccctaacagagcaccccttctcccgaagttacggggtcattttgccgagttccttaacgagagttctctcgatcaccttaggattctctcctcgcctacctgtgtcggtttgcggtacgggcacctctcacctcgctagaggcttttcttggcagtgtggaatcaggaacttcgctactataattcgctcgccatcacagctcagccttcacgggaaacggatttgcctatttcccagcctaactgcttggacgcggatatccaataccgcgcttaccctatcctcctgcgtcccccattgctcaaatggtgaggaggtggtacaggaatatcaacctgttatccatcgcctacgcctttcggcctcggcttaggtcccgactaaccctgagcggacgagccttcctcaggaaaccttaggcattcggtggaggggattctcacccctctttcgctactcataccggcattctcacttctaagcgctccacaagtccttccggtcttgcttcacagcccttagaacgctctcctaccactgttcgaagaacagtccgcagcttcggtgatacgtttagccccggtacattttcggcgcagagtcactcgaccagtgagctattacgcactctttaaatggtggctgcttctaagccaacatcctggttgtctaagcaactccacatccttttccacttaacgtatactttgggaccttagctggcggtctgggctgtttccctttcgactacggatcttatcactcgcagtctgactcccaaggataagtcatcggcattcggagtttgactgaattcggtaacccggtaggggcccctagtccaatcagtgctctacctccgagactcttaccttgaggctagccctaaagctatttcggagagaaccagctatctccaggttcgattggcatttcacccctacccacacctcatccccgcacttttcaacgtgcgtgggttcgggcctccattcagtgttacctgaacttcaccctggacatgggtagatcacctggtttcgggtctacgaccacgtactcaattcgccctattcagactcgctttcgctgcggctccgcatcttctgcttaaccttgcacgggatcgtaactcgccggttcattctacaaaaggcacgccatcacccgttaacgggctctgactacttgtaggcacacggtttcaggatctctttcactccccttccggggtgcttttcacctttccctcacggtactggttcactatcggtcactagggagtatttagccttgggagatggtcctcccggattccgacggaatttcacgtgttccgccgtactcaggatccactcaggagagaacgaagttttgactacagggctgttacctcctatggcgggcctttccagacctcttcatctacctcgttcctttgtaactccgtacagagtgtcctacaaccccaagaggcaagcctcttggtttgggctggtcccgtttcgctcgccgctactcagggaatcgcatttgctttctcttcctccgggtacttagatgtttcagttccccgggtctgccttctcatatcctatgtattcagatatggataccactccattacgagtggtgggtttccccattcggaaatctccggatcaaagcttgcttacagctccccgaagcatatcggtgttcgtcccgtccttcatcggctcctagtgccaaggcatccaccgtgcgccctttctaacttaaccgttaaaaagaatcactacgtgatatcttgcattactaattgaatgtgaattacttctgttatctagttttcaaagaacaacgcataggacatgctaacacatgcgttgccacaggaagtggcgcatttagcaggtgttcctatgttttgaaggaatgatccttcaaaactaaacaagacagggaacgttctgtttataagacccgaggtcttatattccgttaaaatccttagaaaggaggtgatccagccgcaccttccgatacggctaccttgttacgacttcaccccaatcatctgtcccaccttcggcggctggctccataaaggttacctcaccgacttcgggtgttacaaactctcgtggtgtgacgggcggtgtgtacaaggcccgggaacgtattcaccgcggcatgctgatccgcgattactagcgattccagcttcacgcagtcgagttgcagactgcgatccgaactgagaacagatttgtgggattggcttaacctcgcggtttcgctgccctttgttctgtccattgtagcacgtgtgtagcccaggtcataaggggcatgatgatttgacgtcatccccaccttcctccggtttgtcaccggcagtcaccttagagtgcccaactgaatgctggcaactaagatcaagggttgcgctcgttgcgggacttaacccaacatctcacgacacgagctgacgacaaccatgcaccacctgtcactctgcccccgaaggggacgtcctatctctaggattgtcagaggatgtcaagacctggtaaggttcttcgcgttgcttcgaattaaaccacatgctccaccgcttgtgcgggcccccgtcaattcctttgagtttcagtcttgcgaccgtactccccaggcggagtgcttaatgcgttagctgcagcactaaggggcggaaaccccctaacacttagcactcatcgtttacggcgtggactaccagggtatctaatcctgttcgctccccacgctttcgctcctcagcgtcagttacagaccagagagtcgccttcgccactggtgttcctccacatctctacgcatttcaccgctacacgtggaattccactctcctcttctgcactcaagttccccagtttccaatgaccctccccggttgagccgggggctttcacatcagacttaagaaaccgcctgcgagccctttacgcccaataattccggacaacgcttgccacctacgtattaccgcggctgctggcacgtagttagccgtggctttctggttaggtaccgtcaaggtgccgccctatttgaacggcacttgttcttccctaacaacagagctttacgatccgaaaaccttcatcactcacgcggcgttgctccgtcagactttcgtccattgcggaagattccctactgctgcctcccgtaggagtctgggccgtgtctcagtcccagtgtggccgatcaccctctcaggtcggctacgcatcgtcgccttggtgagccgttacctcaccaactagctaatgcgccgcgggtccatctgtaagtggtagccgaagccaccttttatgtctgaaccatgcggttcagacaaccatccggtattagccccggtttcccggagttatcccagtcttacaggcaggttacccacgtgttactcacccgtccgccgctaacatcagggagcaagctcccatctgtccgctcgacttgcatgtattaggcacgccgccagcgttcgtcctgagccaggatcaaactctccgataaagtagtttgactgactacgcacatcgctgtgcgatttatttaaaactttgaattaacaggtacgttttgtcttgtttagttttcaaagatcatctcaacctcatctcgaggcgactttttcagtataacatttcagcgatttgctgtcaaatgtttttttgtttttatttctccgccgctgtgagctttttggtgaagcgcatcagcgacgtttaataatataccatgcctatgattcagcgtcaacactttttttgaaagaatatcctcgatgatatacttcctgccctttggtctctatttgagatacttcaacaaagcctttttccgtcaggtaatcaagcatgacaccgagatcttgggtgaagtgcaccagttcagggtgctgaagcaattctccaaactgccacatttctttttctttcatcacctgaaaaaggtgcgcagaaccgatttcagcttttgaatggatgagaaaatcatttgctaagaataataattcgagccttttctccaagctttcgtgactctcgacaagttcggaatatagcttatatacctgcggctcaatgtgacggacctggttccagactgtcgtttcgggataaaacccccggtcaatcacttctatgcgggccaagtggtgaagagcgtgcactaccgcataatatgcatccagaaaatgatcagcttcaaaaaacgcttttccttctacaaatcttctgatcagcttgccgtattccattccgatctttaatttccgctcggcgaaaggaaaagtgctgagccggtcattgagttcagatatatattcattgcggtcaaacagcactttgccgttgatgatccaatctatgactcttctatttgtcccaagcagaatccattcctgaagcagagcatccgttacaatatgtaaagaagcggttttgtgttcgaattcataatgctttataaaaagaggttcatcagcctgtttcacaatgacaagcatgaccgcatcaaagttatccgtgatggatgatgctttactccttctctcaatcataaggacggccagcgtatcgggatgacttgctctttcttggtaaattggacggagaagattgtccattacgattcctccaatgcgattgtttcactagctattgtttctacatttctatgataaaacatgaaagtccttttttctaaacacattgcactattataacaaatttcctttcaggtgccatatttattcttcccttttcttacgaaaacatgaagaatatgccatatgttttgtgctatagttaaacgagagggggatggacatggcgaaatactcaagcaaaattaataagatcagaacgtttgcgttaagtttggttttcgttgggtttatcattatgtacatcgggctgttctttaagcagtctgttttgcttgccagcttgtttatgattctcggcctgctgtcgatcggactcagcaccgccgtttatttttggatcggcatgctgtccacaaaagcggtccgggtgatgtgccccgcttgcgagaaagaaacgaagattctgggcagagtggatatgtgcatgcattgcagagagccgcttacattggataaaggattggaaggcaaagcgttcgatgagtcttataacagaaaaaacagtgtaaaataaacgaagctgaccgtatcaaagcggtcagcttcgtttagtggttttcttttttggaacattcttggcagacgccgtaaatctccaaacggtggtggcttaccttaaaccctgtgacgtgagcagcaagctgttccacttcgtcaagcccgggataatggaagtccacgatttttccgcagctttcacaaatggcgtgataatggtcagaggtgacaaagtcaaatctgctggacgcatctccgtacgtcagttcctttacaagccccgcttcccggaatacacgcaaattgttatacactgtcgcaacactcatattagggaatttcccttccaaggctttatatatatcgtccgctgtcggatgtgccatagaatccacgagatattccagaatggcatgacgttgaggagtaatccggactcccgtatccttcaacgtgtctaaggcttcttttaattcatgtgcagccatccgtcatgcacctctcttctaaaaaagattcttactttataatgtttataattagtgtacatctttttccggtctcctgtcaaatgtaatctgaagaaaaccccgtgagttcagcatttgtccattaattagacgcaatttgttccaattcacgaagcgcctcggcaacgtgatctttcacttttacctttctccactccttcacaagacggccttctttgtctaacaaaaaagtggatcgctcgatacccatatattctttcccaaaattcttcttcagcttccacacatcaaaagcttccgccagtttgtgctcatcatcaacgaggagctggaaaggaagatcgtgtttttgcttaaatttttcatgtttatcacggctgtcagggcttactccgatgataaccgcatcaagtcccgcgaaactttcgtgctgatcacggaaatcacatgcttccgtcgtgcatccgggtgtcatgtctttcggataaaaatagagaacgacgtacttccctttaaaatccgtcaatgctacttcttccccgctgtcattcactaatttcatatccggtgctgtttgtccgatttcaatcgtcatttcttatacctccgggttttttattaagcgtatccaattcacgttaagattacaaccgttatcccccggctcttttctggaagcatgaacccgttgtgctcgcaatgaagcatgctacaatagaacatgatgtaaggagatattaggagggtcattttttgtatacaaaatcagttgaacttcataaggaagcgttagagcatatcgtcggaggcgtgaacagcccgtccagatcctataaagcggtaggcggcggttcacccgttgcgatggaaaaagcgaacggcgcttatttctgggatgtagacgggaatcagtatatcgattatttagcggcttacggtccgattattaccggacatgcccatccgcatattactgaagcgattaaaacagcggcggaaaacggcgtgctgtacgggacgccgaccaaacatgaggtcactttcgccaaaatgctgaaggaggccattccttcacttgataaagtacgattcgtaaactcaggcactgaagcggtgatgacaacgatccgggttgcacgcgcttatacaggccgcacaaaaatcattaaattcgccggctgctatcacggccattctgatctcgtacttgtcgctgcgggttccggcccgtctacgctcggcacccctgattccgccggcgtgccgaaaagcatcgccaatgaggtcattaccgttcctttcaatgatattgaaagctacaaagccgcgctggataaatggggttcagaaattgcagcggttctcgtcgagccgatcgtcggcaacttcggcatcgttgaacctgaagaaggatttttagaacaggtaaatgaattgacccataaagcgggcgcgctcgtcatttatgatgaagtgatcacggcgttccgttttatgtacggaggcgcgcaggatcttcttcaagtgaagcctgatttaacggcgctcggtaaaattatcgggggcggcttgccgatcggcgcttacggaggcaaaaaagagatcatggagcaggttgctccgctcggcccggcatatcaagccggcacgatggccggaaacccggcatctatcctatcaggcatcgcctgcctggaagtgctgaaggaagaaggcgtttacgagcggcttgatgagctcggcgccagacttgagcaaggcattctcgcccatgcggagacacatggcattaccatcaccgtcaaccgtttaaaaggcgcgctcacggtttacttcactgatgaaaaaatcgtcaattacgagcaggcggaaaatacggacggagaagcattcgccaagttcttcaagctgatgcttgaacgcggcatcaatctcgctccgtcgaagtatgaagcttggtttatcacaaccgcacatactgaagaggatatcgacgccactttacaagccgttgaagatgcgttcagacatatgaaaaaataacttctgaaacaagcgggagcccggggcttccgctttttctttttgtccgatttgtgagataatggttttttcaaaaaaagaccttgaataattggtatgatccctgtatattactttattgtttagcaaatcagccgacagggaaatgtaagtgtcagccgttcgttcggcacataatttattagagaaaggaatgcacgcacaaaccaatgaaacttggtgcccgcatttttaaaacagggattgcgattacgctcgcgctctacttagcatcatggatcggacttccgtcgccgatctttgccgggattgcagctatatttgccatacagccctctatttacaggtcttttcttatcattattgatcaggttcaggcaaatatcatcggcgctgtcatcgctacggtattcggactgattttcggaccgagtccgattatgatcggattgaccgcagtgattgtcatcacgatcatgttaaaactgaaaattgaacacaccatttcgattgcgctcgtgacggttatcgcgattttagaaacaccgggaaacagcttcctgacgttcgctctgatacgaacaagcaccgttattttaggcgtgctgtcttcttttattgtgaaccttgtgtttcttccgccgaaatacgaaacgaagctgactcatcatacggttgaatataccgatgagatcatgaaatggatcaggctgacgatgcgtcagtctacggaacactcgatattgaaagaggatattgagaagctgaaggaaaaaatgatgaagcttgatcatacgtaccttctttataaagaggagagaagctactttaagaaaacgacgtatgtaaagtcgcgcaagcttgttttattcagacaggcgattattacggcaaatcgggcgcttgatacgctgaaaaagctgcaccgctatgaaaacgagatttatcatatgccggaggaatttcaggagacgctgacagaagaaattgattatctgcttcattggcacgaaaggattctgatgcggacggtcggcaagatcaaaccgcatgatgacgatgctgaagaaagcataagatataaacagcttttgacgaagtctttcttgaaaaatcagcagaactgcgaggatgaactgcttgattacaatatgctcagcattatggctgcggttgcggaataccgcgagcagctggagcatctcgatacgctaattacgagttttcagacataccacccgaaagacagcgaattagaaacagacgaagagtaacccggtgcttccgtaaaaccgggtttttttgcattcaaaaaacgtatgccgcccattcggacggcatacgtttttgtatcagttcaaattctgaatcgtaaataagtgtctgtactggccgccttgggccattaattcctcgtgcgtgccggtttcgacgacggcgccgttttccatgacgacaattttatccgcgtgcgtaatcgtggacagtctgtgggcgacgataaaagtcgtccggtttttcgcaagcttttccatcgcttcctgaatgtagtgttcactttcaagatcaagagccgatgtcgcttcatccaagatcagcagcggcggattttttaagaatacacgggcgatcgaaatccgctgcttctgcccgcctgacaatttgacgccccgttcgccgactttggtttcgtagccttcggggaagttcataataaattcatgggcatttgccgctttcgcagccgcaaccacctcatccagagacgctcccggtttaccgatagcgatattttcacgaatcgtctcactgaacagaaacgtatcctgaagcaccattccgacttgattgcggaggcttctcgcttcataatcgcgaatatctgtgccgtcaatcagcaggctgccgccggatacatcataaaaacgcggtatgaggctgacaagcgtcgattttccgccgccgctcatcccgacgagcgcgacggtttccccttttgtcacctttaaggaaacgtcctgcaaaatcgtttcttttccttcctcataacggaacgagacatttcggaattcaacttcacccttaatgccgtcagcttttaatgcattcggtttatcagtcagttcatacggctcgtcgataaattcaaatatgcgatccattgaagcgatcgactgggtcagcgtcgtcgatgagttgatcaatcttctgaccggattgtacattctgtcaatatagccgacgaacgcaaccatcgtccctaccgtcagcgggccgtttatgacaaaataacccgcaaacgcgataacaagcagcggcgccaaatccgtaatggtattcacaactgcgaacgttttcgcgttccaattcgtatgacggatcgctttgtccagaaaatgtccgtttttttcatcaaaattggcttgttcataatcttcaatggcgaaacttctgataacgggcatcccctgaactctttcgtgcaaatgtccctgaacttgggcgagtgcctgagaacgctcacgtgtcagttttcggagacggccgtaaaagtatttcactgaaattccgtataacggaaacaaaatgacagatatcaatgtcagcttcacatcgagtgtaaacataatacagatgacgatcagcaccgtcatcatatcaagccagatattcatcagtcccgttatgacaaagtcttttgtctgttcgacatcatttatcacccgggaaatgacttcgcccgttctcgtgttggcataaaacctcaggctcaatttctgaatatgatcaaacaataccccctgatatcgtagagcacccggctgcccgtccattgtgcgaagtattgccgatagtactctaccgggggacgcagaattaaaaacagcacgaacatgatgcccattatcgtgaatagcgatgatgttttagcgcttgccgttccgctcccttgaataatgtcatcgaccacgtattttaacagaagcgggagagccagcgggatggagaattttataatgccgattaacactgtgataaaaatttgttttttataaggttttacaaattgcatatagcgtctgattacgcccacactttatccccctctctctttaaggcgtgtgagcccatgtgaaaaacctgttgacaccccaacaggttttttattgtattctttattttgtatagcgcagataccgttcataccacatatcaacaaattccggagcaaacggtcctttccgctgatgaatccaatgcagcagcgtattcagatactccttcagaatgctgtcgatctctttagggtaattcattgatttgcggtggtcatcgtattcatcctcgtcaagaatgttatacgtcatatccggaaacaccttgacatccaaatcgtaatcaatatatttgatggcctctccgtcataagcgaacggcgagctgatgttgcaataatagtgtaccccgtcatctctcagcattccgatgacgttaaaccactgacgggcatgaaagtagcagatcgccggctctctcgtcacccacgtccgtccgtcggattccgtcaccattgtccggtcgttggctccgatgatacacaattccgtactttttaaaatcgtcgtttcattccaaattcgatgaagcagcccgttatgcttatagctgtgaatttgaatggtttctccttccttgggatatcccatatttctcccctactttctgtaaagccctgcagtcaatgcagccgcaattgctttccgacaagtcttttcactattataacgttacgaattaaaaaatgaaaataaaagaaccactccgcttccggaatggcacattcatttctgcacataggaagacggcttttccgtgctgcgataagactggatgacttgctctgtctgcctttggaataactcctgtatgccggccaggtcttttcgctttgtcgcaatttcgtcctgtacattgtccagctttgcatctctttccagactgatgagttccgcttccacctgccggcagcggtcaagttctgactgcagctcgagaagctgatccatgattttcatctgttcacttacaagcttttcaaactctgacatcgggttcctccttaggctttaggttgatactccttaccatttcgattttacgccggaaaaccctttgactcattctgtagaggaatcacaagttttgtcgttttagcaacagaaaaaagcacttccatccgaagatgaagtgctttttcgtttcagtgattagctgttttgctgtttgttttgttcagcagattggttttgctttctaacctgctgcgcatcagtttcactgccgaattcagtgccgtattgaccctgaccggaagctgattgctggttttgtcttttcacctgctgaacgtctgttttgctgtattttgagtttgccattgttatcacctccacgcactttagaatgcgcaggagacgataaggctattcatctttttttaaaacttatacgagcagagagcgtccgccgtcaataatgatggtctggccgcggatcatgtccgcttttgaagaaactaaaaactccaccgtgtcgatcatatctttaatctcgaccattctgccggccggcgtattttggcgggcatcttccagcagttcatctctgttagggaaatgcttcagcgcgtccgtatcaatcgctccgcctgacaccgcgtttacgatgatgtttttcggagaaagctcaaccgccagataacgggttaacgattctaaagcggcttttgagacaccgaccgtcgtatagttttcaagatagcggatgctgccgagcgagctgatgctgacgatgtggccgcctccgtttttctccatcatctttgccgcttcctgggcgcagaaaagcaatgctttcgcgttgatattcatcgtccagtcccagtgtgtttcttcgagttccataaccggtctcagcacgcctgaagccgcattattgacgaacacgtccagtctgccgaatgtttcgtcaatctggcggaacatgtctttgatttttgccggctggccgacattagctttaataacgagcgttttaacgccgagtttttcaatttcttcggcggtttctaatgccgcttttttactgcgggcgtaattgatgacgatattgtatcctttttccgcgagtctgatggcggctgctttcccgacgcctcggctgcttcccgtgatcagtgcgcatttattttgttccatttttcctcagctccttgctgtgtatagttcttttcattcaacaaacaataaaagcaatatctgttgaaaggggtcttttatatgtatgtcggacgtgatatgggcgaattggccatgatgcccaaacaagattggagagattcagagctcgcctatttccatcatgccttccagcaaattatgccgtatttaaacgaagaaggccagtccaaataccgggaactgattcaggaaatcgaagcccgcggcggactgaaacggaatgaagcggattacggccacggcactcgcgtcagctatgactgacgctttttagcggccgctttcttccgccattttccatatcttttgatgggaaacgggaaatgcgtattccttgagctcctcttttgtgacccgtatgaattccgttgtatccgacacttgttttactttaccgaaaaagaccgaaatattccagacgagatgggtgaaaacatgttctacgatgccttccagctccccgatttcagcggttattcccatctctttttctaaataggcttcaagctgctctctttcggttttgattcctttctgggtttcggtattcggaaactcccacaagttggcgagcaagccttttggcggccgtttatgaatatagacatcgccttgttcgtctgtcagcacaacggctgccattgtttttattccgggctttttctttttgcttttaacgggcagctcccgctctgtcccttccgcaaatgccgaacagtgcttttgtacggggcaaagcaggcatgacggtgatttcggggtgcagatgatcgcgccgagctccattaaaccctgattgaattcagatggtttttcatgagaaatgaaagcggataccgcctgttcgaaaatggttctggttttaggttttgcgatatcgtcccatatggaaagaattctcgacatgacacgcatcacattgccgtctacggcgggaatcggtttgttgtatgcgatgctgagcacggcgccttttgtataagggccgacgcctttcagtccgccaaattccttttccccggcagggacgactcccccgtaccgctcatgtacttcttttacggcactttgcagatttcttacacgggagtaataacctagcccttcccaggctttgagcactttttcctcatcggcttcagcgagcgccgaaacggtcggaaattgctcaacaaaccgccggaaataaggaatgacggtatctacgcgcgtctgctgcagcatcacctctgacacccacacccgatacgggtcctgattttctctccacggcagaattctctgttctctttcgaaccatgtaattaagtcctcgcgaaatttgtctatatctttttgtttcattttttcttcaagtgcgttcatatcttctcctcagatgtttcgggttccgcttttcttgacactgtattttggtgtaaactaagggcacgttacgataatatgttacattaaatagtgataaagaaaaagcggaaacatatgagaacggcggataaacgccatgattgggcaaacagaaaatggggaatatcttataatgcgaaatatgcgggcggctgatttttaacgcctgctaggaggtcaacaatggatactggcactcacgttgtcatgggtatcgcgcttggcggaatcgcaactcttgatcctgccgtcggcatgcacaccccaatgtctcaggcagttatgatcgccgcgcttgccggctctcaggcacctgatattgataccatattgaagctgaaaaataatgccgtttatattcgaaatcatagaggattcacgcactccattcccgccgtattattttggtccgttctgattccgggcattttgtttatgttttatccggaagcgaactttttgcacctgtggctgtggacgcttctggctgtcgttttgcatgtgtttgttgacatttttaacgcgtacggcacacaggccatccgcccgttttcgagaaaatggatcgctctcggtttaatcaatacctttgatccgtttattttcgtcagccatttggccgcgattgccgtttggtatatcggaggtcatccgggcgtgacatttctgatgctttatatcatccttgcaggatattacgccgtccggtttttgatgcagctgcggataaagcgaaggctgcgcgaaatgattgaagaggagattgaaaccatcattatttcgccgacgatgaaattcaggcagtggcgtatcgccgtgacgacggcccatgccttttatgtcggcagaagccttgacggccatgtcgtgatattggatacattcaaccgcgtgcccgttccggaaaccgatgtgatgaaggccgcgaaacaggacgaaaatattgcagcctttctttcattttcccccgtttacaggtgggaggtcgatacttttaaagatcattatgaggtgcgctttattgatttgcgctaccggagcaaaggccactatccttttgtcgccatcgtccacctcagtcatgatttagagcttctctcttcctacacgggctggattttcagcgaggaaaaactgcagaaaaaattaaagctcggctctgtttaagagccgggctttttttgtcttctcacatataatgcggcaaacacgaggctgatcaccgatagagcggccgcgggtttaaaaaacggcgggtaatacgttaattgaatatcgttttttcctttttgcgctttaaatccgataaaggaataatccgctttttcaatctgttcttttctgccgtttatcttcagctcccagcctttttcatatggaatcggaagcatgatatacggcgcgctggttttgttttcatacgagatatgaagcgtatttccgcgccatctgagatcggcccgcggttctttttccgcttttcggtatgcgtttttcagcgtatcgtaccgttcttcgtaaagcgccagcctgtcaagctgatacgatcctttcggcagacggatttggatgttttttgttttcggcactctgacagtaagatcgttgacacctgttttgtaaatggattgattcgattttctcgttgtcgtgtaatcgttcacttttaatgtaaagccctggtccttcgctttattcttcaaataaaagctgacgtaataatcgccgccgtccatcttagcggcttgcggcgtaatgatcaggccgccgccgtcttcatttaccgtcaggatgccgtcttgataatccgcatggtcggccgttacctttgcctgacggatcatatttttcgcctcaggcgcttttttcgtgttggctgcgcttgattccgtgatgatcccgtcaagcattgcccgttctctggcaagggagggcgcttttttcagaccgtcctcgttatatacgcgatcagctgtccgtacgaacggaagcatatattgattttgataaaccgcataatgggatgattccatgatttttttgaacccgtacggcacgccggccccgtttgttttttccgtcatataatattttccgtaaagcaggctgtataaattagccctgtttcctaatgtcgcataacggctgacgctttccctgcccatgtcaatccggaggtcgttccagtaaaaggacagcagattgcggttcagtatgcttgaatatacgctgaatccgttgaacccgtatatgatcggagtgttattgaaaacaccgttcatccaatccaaacgggcaaacggatcagggtctttttctttcaggcgctgaataagctctgtttgttctttgcccttatagtcaggacccgtcataaaggtatgcgataccgtataaatcttcccgccttctgataacgcatatttttcatatgtattagccgtcagcaccgccgtcaagagaatgacggcatagacggcggacaccgcgcctttcagtcttgtctttgctgcaaggaaagcggcaatggtcagccccagaaggagcaggataggcaggttggcctgatcagaaatatccaggctgaaccgtctcacttggctccaatagagcagaacggcgagtacggcggatatcagcatactcttcatgctgatgtctgaaagcttagaaagccctgctgcaaccgttccggcaatcgtgaagcacaggacgtattcaaacctgttttgcggagctgaaaaaccgttaaaggcgcttgccgcaaacggactgaagtgaaacagaatgtacagcagactgattcccgcaaacagccggaacagccggtttttatataaagaaaatgtaaatagaaaaagtaaaaaaaccgccggcagaatgattatccggcttgaaaataaaatgttgtcggaaaaatcaagccatgcaatttgctctgaatacggcggccgcagattatgaagatatccgtatacgacagggataaaggaaactgcgcttatgccgaacccgagaaggcccgacagaataaatatcctgcattgagcgagccttttcgcctcattgccttcaagggggatcatccacctgaataagatataaatgccgatgaaaatcagattaatatacgcaaaataaaagttgttgatcaatgtcagcgcacaggcgaagataaaccacgccggctttttttccctgatgattttttccgcgccgagcacgagcagcggcagccacaccatactgtcagtgaaaaagtcccaatacacctcatgccggaagtagataatcgagaccccgtacaacacggcgccggcaaaagcaggcaccgtccgtttgacgaaatagcggaacacacacgccgccgtgaatatgatgaaactctgcttggcgatgctgataaaaacggaggcctgcgcccaaaacagcgcatcagcctcacccgtcagctgaataagctgcaaaaagcggacagcggcggagataaacaggaatagaaaagaagtagagaaataatagccgagctgactgtacactcccccgcccagtccgaacgaatagctgtaaaacagcctgccgttcatatattgatcaaacagcagctttttgaagaccgccatttgggcgatcccgtctccagaccccgtcatatagcggccttccgaccactcttttaagaaaaaaatatgagcggctgccgcagccagcacacaggctgccggcaagatccatttattttttttcatacaacgtccccagaccctgcgcacagcggcggctgtttaatggttccacttgcgcttttttgtataattcgtttcattttgttctccgtacgttatattcgcttctttaattaaatagtgcgggcgtttttttgtttcatagtaaatccggccgatgtattctccgatgatgccgagactcaaaagctggatgccccctaaaaacagcacggcggaaataatggtgaagtatccgggtacggacacgccgtgtgtcagaatatgaacaaaggtcgttacaatataaaccatcgacagaagcaatatcagaataccggtgaaaaagcataccctgaggggcttgttgttgaaggagacgacaccgtccattccgtagttgaacagattgctgaatgaccatttggacgtgccgttcttcctttcgacattttcataaaatacgattttctggtcaaacccgatccagcagaacagccctttcgagaaacggttcccttcactcagcttcaaaagggcatcaacggcctgccggctcagcaggcggaaatctccgaccccgtcacgcaagtccacttcgacggctttgttgataaatttataatacagggaagaaagcacggaacgcacggggctgtccccttttcggttgcgctgcgcgatgacttggtcatacccttcttcatagccttgaatgaagtctttcagcagatgggtcggatgctgcagatcggcgtccatcacgattaccgcttcgccctgcacgtgttcaaatcctgccaaaatggccgcttctttcccgaagttgcgggaaaaagatatgtatttgacgcgatggtttctggcggccagttctttaatctgctgaagggtgtcatccgcgcttccgtcattgatgtagaaaatttcatagtcataatgaatcgtctgaaattctttttttaaagattcatggatgagcttgacgttgttcccttcattgtaagacggaataataattgagattaacctttgtttcatgaaggcaccttctttgtattattctttttttaggacggccttaaaggaattgtccgcaaaacttcagtaaggcttttcctttttttaatgacgtttaaaccctttttttgttacagggaaagaaatttttttctgcatatgatttatattttgtcatgtttttcggcagatatgagaaaaaaaagaaaaagtctgtacgcgggacagactttattgctgaaggtattcatgaatcaaatggctgacgatgcgcggtttttcgtgaatgacccaatgtgaggcatcatctatgaagattaagtcgccgtttggaatcatccgttttgtttccttggcgagctttttgctcagcgcgcggtcgttgacgccccatattaaccggtacggaacgggcattttaagcggaacggcagggcctaaaccgccggctctgatcgcccggtaccagttcagcatcgccgtgagcgctccttttctgccccatgcttctttgtagctgtcgacatcttcccgtgaaaaaagcgccgggcgttcagataagccgatcgcgtgatccaatacgcggtaatcgtcttcagacaatctccgttccggcttttccggaagctgaaagaaagcgatataagagcttttcttccactgcggcgggtagaacggtgtgaccttccgcataaccgccgggtgcgggatattgaccgtgatcaatttttcaacgttttgcggccgcgtggatgccaaatgccaggccacggctcctccccaatcatgtccgatgacgacggctttgtcatctgtaaaatgagtgatcagcccgataatgtcgtctctgagcgtatcaatggtatagttttcaatgccctccggtttgccactgagattatagccgcgctgatcaggcacgacaacatggtatccggcatccgccagcggtttgatctgactcttccagccgtaccagaattccggaaacccgtgcagcagcaccgccaaaggaccgtctttcggaccggctgaagccgtgtgcagcgtcactccgtttgtttcgatcatgtgaaacgtaatgtcattcatcgattctcctccccgtttgtttcaatcttctttctgttaagacgatgatcagtacgctgatcgcgatcaacaatacggcctgaacgatcagggcgaacggctgagtcagccggataagcaggctgcccgcaaatccagctgccgccgaaataaggccgaacagaatcatgaggagcgcactgaatcgattgccttctttccactgcgactcatccgccatagagcgcttcgtccgatatccgtacaggctgttgatcgacttcggcggaaaaaacgtgactgaaatgccggccgcagccatcagaaggccgccgattaccattatcatatccgtcactctccttttcatcttttacgaaaggaaaggcgaaaggtttcagaaaaaaagcaggcttattcgcccgcctgaatctttacttttgagttaagtcggccgtttttacataacctgctttcccggcgtatgtgacgtacgcccatttacggtcaaatcctccgtcatggctgaacccccagccgagcacattgacggtttcacccgctttaacagacccttttttgccggtttccaaagtcggcgtataaaaatcggtttgtttcgcggtcaccgccttcaccggctgcttcatcagaaaatgcgtggaaatataggctttgtgacctttgtagtcaatttcagcccaatctgctccttgaagccgtttaacctttacggaatcctctgaacgaagcgtgccgataatccgcccttgtttattgggttctttgcggacgttaagttctcctgctttcacgatatatgtatctgctgcggtgtctatttttgtctgatgaactgctgcggcattcgctgccggatcaaaaaaaacggtgcctgcggctaaaaataagcaaagtcctgcggccggaataaatgcggttaacccctttttcatgttcattgtggttcctccccgctattttataagttattacacatttccacattccgccggtcgtcaaacatgattttcccatttcttttataaaaagaaaaaaccgccggacggtatccggcgggcgcactgctatattaatgcaggagacccctgctttgatccaaataatgagaaacgtcttcccgaacgctttggaacatatggagcttgctgccgtatgattcgatccattccttgacgacgcgttccgtcatttgctctccttggtacgggcggccggcttttgcgtaagtcgcttcgaaatctccccataaaagctcaacccaagtccgcgcttgcaaatagctgagcatgtcatttttctcaagcagcaaattcgtcagtttgtcgatatatgtattcatgtctctgtctcctttccttgggaaaacctgctgcttttacgcagcttgtcacaggcatatactaactttacgtcttcagtccagaaggcgcaaccttttgatattggccgagggggaaaacaaatggtccggaacaaggcaaaaggatttcctaatcagaacaataataagtttgaaggcgaaccgcgggcaaaggatgactacgcttctaaacgggcggacggttcaattaattcgcacccgcaagagcgcatgagagcttcaggcagacgataacacacaccgtaagagaccgggaatgacccggtcttttttttgcggaaaaaaacatcctcttgcggtcataacgctaaataaattccataatatgttaaatgctaaaccgcaagccggtagacaaaaaaggaggggttttataaaatgaagacagtttcaaaacgattgctgagccttaccgcattcttactgtcagtttcattatttgctgtttcagcagaagcagcgggcagcccgcagacatctgtatcaaacagcggtgaggagtttgacgcaaatcagaatcagcctgtacaaacaacacagacatcccccgcttatgaaggaacgggcctcaccaaaagacagcttgcacaaaacagcaaagctgacatcaagtcattaaagccttccagtattattgggacagacgaacgaatcagaatttctcccacaacatcatttccatatcgcgcgacagcacagctgaccgttacatacagcggcagcacaagcacctacggatgcaccggtttttttgtcaatgctgacacgatcgttacggcgggacattgcgtgtatgatcagaaaaacggctgggcatcgaaaattacggcagctcccggccgcaacgggtcatcgtacccgtacgactcttattcaggcaagacattctacagtgtcaaagggtggacagaaaacggtgacacaaactatgactacggcgcaatcaaagtaaacgggtcgcccgggaatactgtcggctggtacggctatcggacgaccaacagttccagtccggccgggctttcctcaaccgtgacagggtatccgtgcgacaaagtgtccggttccatgtggtcggacagcaagccgatacgttctgccgagacatataaactcacttacacgacagatacgttcggctgccagagcggatcgcccgtttaccgcaattacagcgacaccggccagaccgccattgccattcatacaaacggcgggtcgtcttacaatctgggaacaagggtgacaaacagtgtattcgacaacattcaatattggtcaaatcaataaagcttttgtcttctttctcgcggcagccgttttatgcggatgcggcaaagcggatgattccgccgccaaaaaagcactgcccgttacgctccatgttgagaatgcagacggttcaccggcggccggtgtgacggttaccgtgatgaaagcggcggagtcagatcatcagccgaatatagaccgcggagagataataggcaagactgatcaccacggtgagatgacatggaaaagcggcgcgaaaggaacctatgccgttgtttttgaaaaagacggggtaccggaaacccggaatatttccttagctgagagcgataaacatacggtgatcagcattacgttgaaacattgaaaaaagcttgcaggcggaatatcccctgcaagctttttgttatcctttatgcacttggtattcataaacatctttcttctcagacagatgagcgaacgtggaaagcacaaggccgagagccgtcatcagcgcaccgccggcaaacagccatgagtaagatcccgttcccccgagaatcaatccgccgatccaggcgccgagcgcgtttgccaggttaaaggcggaaacgctcaccgcagcggcgattgtcgtgccgttttcagaggaggaaataaccttggtctgcaaaagcggcggcgtgccgaacgcacatgcgccgaacaaaaatgtcgctgaaacggctgcggcgggaaaaacagcgatataaggaaaaatcgccaagacgccgatcaggccgatcatcacaccgatcatcgtgcgcgtcagcagtttgagcggcactttccccgcgaagaaattccccgccactccgccgagaccgtaggcaaataatgcgcctgtaatgccgactgtgccgaaccccgctgaatctcttaaaatcggctcaataaacgtgtaagcgataaagacgcctgagtagccgagaatggtgatcgcaaaggaaaaaatcacttgtttatgcttaaagacactccattcattcatcagcatcggaatcactttcggttttcggttcggtacgaccagcatcagtccgatcagcccgatcaggcctaaaacagaaataatgaaaaagacggcccgccagttaagggcatcccctaaataagagccgaacggaacgccgagcatcagcgccacggttaatccgccgttcatggaagccgcggcggcggaacgtttttcaggcggcaccatttcacttgcaaacaccatggcgatcgcaaaaaaagctccgtgaatggatgcggataaaattctggaaatcgccagcacggcgaagttcggcgcaaagacgctcatcaggttggcaagcacgaagatgcccatcaaccctagcagcaccggctttctcggcagcttaaccgcgataatagttacgatcgggcccgtcaggcagacgcttgccgcgtacgccgtaacaagcatgcccgctgaagatacatgtatatgaaagtcatcggcaatcgacgtcagaatacccataacagcatattccgtatacccgatggaaaatgtgcaaatcattaaaacaaaaatcattaatttcacagatggctgtttcattttgatattcaacgcaaatcgcctcctttttattaaaaaacaacgaattccatcttaaaagatatcaaaaatgaattcaatcattttttactgaaaggttgaaacgaatgtgcccgaaaagaaaaagaggccggaaccggcctcttttgttattatttttcttttaaaacggaaatcggcagtgcttcttccccgtcagacggggaagatctgtgtccccaggcgaatacgccgttgatgtaatcaatgcggaaagtgtcatcagaaccttctatctgatacaccccgccgggccgaaagtcttccgggttcagcatgtaagctttggccatcgtaattttccgttcaagcacggccagttcatttacaatgcccatctgttccgctttacgcgctttttccgtcagtcccgcaatttctgtctgtagttcatgaggcgtcatttgactgtatcgtttgtccatttcagtttactcctcttcctgcaagaattgatcaatatcgtcaatcgagaatccttttctgaataagtactgtttgaccttcattccgctttcatagctgccgtcatagcggtatttcctgatcgctttttccgcatgagccttcagagcttccatctcggcttcatcatcattttcatactccgtctgctccagagcggcattgatgacgtcgaaagggaaaccttttcgctgaagctgcatctgcgcccgctgtctgatctcttttgtggacagctttttgtcttttttgaggattttgccgatatgtttcagcgcttcttgtatctgctcatcaaatgtaaacgcgctgagcgtctccttgatggtatcgtcgtctattcctttcgctttcagctcgcggaacaggacgtcagggcctttgccgtttgtttttttgtgggtgctcgcataggcttcggcaaattctttgtcatttaagtagcggtaatcgtacagtttatggatgacttcagaaatgaccatgtccggtgtttcttttttcttcaggtgatcccggacttctttttcagaccgcatccgatatgataaaaattcaacggcgcggttaaaggcttttttcacgtcatcaccgtgctggatttcaagaatgtcaagctcgtccagttctttcccttttttcaggtcaaaacgcacaagcacgtcggcgtcgacgctgaatgcatatttctcatcaagaaagatgttgaagcgctcggtatttttcttttgggtcgatatttttgtaataaacggcatcccggtctccttccccgccccgatgttcaggcgtttttctttttggcaaatgaggtacagtatatgtatcaacgtgtaaggagagatggatatgaatatcgcgatgacaggcggcactggttttctgggccggcatctgacaggtgtgtttacccgccgggacatcatgtctatattttatcaagaaaacagagagaaaccgaacaaaaaaatgtgacatatgttcaatggctggccgaaaacgcggcgcctgagcgcgagcttccccctattgatgtatgggtgaacctcgccggcaaatccatctttgaccgctggacggacacaacgaaggaacaaatcatttcaagcagaatagaagcgacgagagaagtcagacggattatgaagcagcagccgaaaaaaccccgggctttgattcaggcaagcgccgtcggcatttacggcacaagcacagagaaaacgttcactgagcagtccgatacgtcaaatgaagactttctcagtcatacggctcatatgtgggagcgtgaaggccagaaaattgaagcgctcggcatccggacggtatatgccagattcggcgtgatgctcggtgaaaaaggcgccctgccgctcatggttctcccttataagctgttagcgggcggcaccgtcggctctggacggcagtggctgtcatgggttcatgtcgatgacgccgcggaacttattgcttttgcggcggagcatgatgacttgtccggtcccatgaatgtgacatcgccgaatcccgtagaaatgaagcaattcggaaagacgatcgcaagcgtcctgcaccgcccccattggattcccgtaccggaattttttctggagaaggccttgggagaaatgagcctgctgatcgtaaaaggccagcgcgccctgcctaagcaggcgctgacatccggttttcagtttacgtatgaagaacttgagttggctttaaaggatatcttatctgcataaaaacggaaataaaagccaatcctattggtattctgttttgaaggagggtcttcttttatggaaaagaagcgcgaaaaacatcagcagggagccaatctgaaaaaaatgcaggaagtcctttattccggtgaatttaaaaaagcggaaagagcagccaaacggaaataaactgaataaagatcggggccgggcagatactatgtttgtttgatatcacttttttcagggggcgattgatatgggcagaaatcatactcacaaaaaccgtgataaaaacaaacaaaaacttcctcaagttccggatgctttgaaacgcgaaacagacggcacgtacgaggaatattcaagcgagcttgctgattccgctgaccgcgaagcgcaggcgcggatgaaagccgctgacaacagagctaaaagcaaaacccgctaatacgaaatccccgcctctgtatagagacggggatttttttacaactcggtaaacaggctttttgccggcgtccgttctttcgccttaggctgttcatccggatagcccgtttgaatgatggcggcgaagcgctcattgtctgccagaccgaagtcttggtgcacctgtttgtcatacatgatgcggccgcttttccagaccatgccgatgccgttttcatgtgcgagcagctgaaggttttgaatcatgccgctcagcgccgcgaaatcatcgtttctcgtaaattcattttcatcttcttttaagacgacaagcaaaaatcccggaacggcgctgaggttttttctcatgttccgctctttttcctcgttgaaatcatcttttatttttttgaaaaatgagacgtagctgtccgcaagcttttctttacccgcttcgcttgctgcgtagataaaacgccatggctccgtcagtctgtggttcggcgcgtaaacggccgtttcaagcatatctaatatgacttcagaaggtacggtttccggcttaaacgaccggatggatcttctgtttctgattgtatgtgcaagactttcgttttgctgtagttgttcggttttcggcatgccgattcaccttcctattcaattgaaaatgattatcatttataatataacggatacgaccgtcttttgtaaaccgttacggaagctgaaaattgattgattcggcatacacggccgttcccgtcatctcgattttcatcttttcgttatcttctgtaatcctgatttccacttttccgtctttcccgatttcctggccttgttcaatcgtgaggcattcggcttcagagcctccgtattgccgcatataggccgccataacgcctgaagcggttcccgtgacgggatcttcggtcgttccggagaaaggggaagaaaaatggcgtccgtgcagatcactttccggatgaacggtttccagagaaaacggatgaacgctcgctttcggaagatcgcgcaaaacagcggggaattgtgcgttgtccggcaccatattccgtgatgcttgaagtgatctcagcggaacaatcagtgtccagatccccgttgatccgtaaacaatcggcagctcgctgtgaaaatcctcagccgtaatcccgagcgaggccgcaagcttttctttgtctcccgtaaacggcagaaattgcgggggtgcctgttcgagcgtgatgtatacccggccgtttcgttcagcggcttttgcgggaagaataccggcttttgtctcaatttgatatgtctgatcagcctgaagccttcccttttcaattaatgcgtaaagagaggcgacggtagcatgtccgcataaattcatttcgtggccgggtgtaaaatagcggatgcgcagatcggcttctccgcttttgcagagaaatgaggtttcattgtaccctgccatttcggcgatcatctgcatctcttcatctgaataatcatctccgttaaagacgattcccgcgggatttcccaaaacaggaatatcggtaaacgcttcatatttaaacacggttgcctgtttcattcatcagccttcctttcaccttatgatcatgttattcagtataacagagtaaaattagaatttttagttaattcttcaaaaaaaaagacgccttttaacggcgtctttttttggtttttccgatcaggcgggtgacgagaatcatcgtgacggacagcgatctgtttttacggtacgccaagtatttcccgcgccactccggtttgtatttttctttaaaggcccgcagcccgctgaagctgtacatataccggacgttgttgaaaatgacggccgcgattctttccgaccagaaagatgtaaaagccgttcctacgtttgacaaaggcgccatgcccatattaaaggtggtatagcctttttcctgcgcccagagaaacagacggataaaaagcgcgtccataataccgttcggcgcacttttccgataacgcatcaagtcgactgatatctcgccttcctgatacatcggcatcaggttggcaaaagcgatgatctccccttccgcgtctttcacgtaagcaatcggcgcctgttccagataatcccggtcgaagaaaccgagagaaaaacctttctcttttttcggtccgagccattcgtccgatatgtctttcagcttggcgataaactcggaggaaaacggcggttccccgacatgaaatgtgtagccttcgcggtcaaatttgttgttaatcgcccgcagccccgcttttttcttacctgacagcgtaaatgcttccatatccacgaacgcctcttctccgagcttgaagaagttatagccgaagtcatggtacagcgccagatcttcacgttcgatctgataaaacatgacactcagcccctgcttatgcgcttcattcagaaattcctcaatcacaagcggaaaagagtctctctgtcctgacggatcaccgagcacgacaagccttctggaaatctggccgaacaataaaagcgctttgccgtcgcttgagaaataaaaccgcttatccccgagaaagccgagatggctgagggcgtttccgccttcttccgccaaaaaggacttcagccgttcagggtcggccttttctccgatcggcttcgatcttttatgataaaagaccgtaaacaacaggaaaaacagcggcacaacaataatggccgtcatcgtggcatatgtaatgtgcgaattgttatgaacgaaataatcgtggcgcagcagccgattcattttatcccagataaagccggcaatgagattgtagttaaacaaggcgataataaacagagcggccgcaaaaatcatctggccgagcgtatacgatgcctgctctctgataaactgccgctttaacagcaccagcaatacgatgacgacaggcagaataaagatcgcgctgatgttcaatccttttaaaaaactgaacacaaaaccgccgaccagcgcggcaaccgccattgaataagaacgtttcgtccgtttgtataattcaatcggcaagattaaaagaatcaaagccgcgcttaacgataacgcgttaaacgcaaggagcgccgggcgcggaatatgcgggatgaccgtctccctgtcaatcggcagggcgacggatgccagcacaacgactcccgccatgaaaactaaaagcgacagcgaaccgtaaagcactctgattaagatggcgcgctggaatacgagaagcacgttcgtcgtttccacggcgggcgccatcttcggatttgattccagccgtttaagcgtattttccgttaaatcgccggccgcaaagaacagcccgaacacaaacggaataaatgaatacacaatccggtagatgacgatggatgtcacaaccgcctcctgcggaaagcccatattctgcataccgagcagaaacagaaggtcaaacgaaccgaatcctcccggcacaaggctgatgattcccccgatagcggcaatggcaaatacaccgaatacatggcggacatccgcgtgaatccccatgacatacagggaataatacatgacgacggccgccgcaaaccattcggcaaacgatgccccgatgtaagaaaaaaccggatgcctcggttttgcttcaccgtcttctgcgcgagcttttttattgttgacccaagcggcgattaaggctgccggcacaataagcgccactccggcgattacagcccacagccacggtttctcacctgtaatctctccgaccggcagaatgcgggcaatggtcaggatactgaagacggacagcccgagcagcgctgaggacgtaagccaggcgatgcctgcgacaaggcgttttacgtcattcgtatgctctttgtaaagcatcgtccgcagcccgacgcccgccagaccgccgaatccaaggacattgttaaaggaattggcgataaaggagaccctgaatactttccaattcggaatgtcgaggcgaagcgtccgtttcagcacaaagtcataaaaggacatcgcgctgacggcaaggagaccgagcagaacgagaataaataaatcgtaacgctcaatcccgttaataatatacagcgttcgtttaaaagaaaggtctgtcaattcctttttggactgataaatgactaaaagcaaaactgcaataggaaataatacttttaatatcgataaggcattctttttagtcagcaatgttctctccaatcatcataaaatagcttatttattataattcccccaataatctccaacatattatacactaccacctcacattcaaacaaaactcgtctgcaactttctttctctgattaaaatcagtaatatggtatgcaggagtatgaatgaggaagtgagacgatggattataatctgcatgatacaacggtattaggcggcgatattttttctcctgaggaacgggatatttgggtgctgtacatgaaagtgatgacctcggcgggactcggcgatgtgtcggagtggatgaagcttgatatgagcatgccgcaaatgaaggtgctgatgcttctgaacaaccacgggacgcttaaggtgagtgacatagcggagaaaatgggcgcttctctttcaaatacgacggggctccttgaccgtttagaaaaatcatgtttcattacacgcgctccgtcagaagaagaccgccgttcagtcgtcgttcaattaacggaaaacgcgaaagatattttccgcagcctttatcaaaaaggacatgtaaaattgaagcgttcattggaaacgctgaccgctgaagaaaaacaaacggtcaatcaaggacttgccatcttggcaagagcccttgattcttccaaacaggcatagagatgaaaaaggcctgccggtatcggcggcctttttttgtttgacatttaattcacttgaagtgaataatatattcgaagtgaattaaaaaaggaaggattgatcagtatgccggatccattgcaaacagaaaaaaaccagagccgggccatcactctttttacgatcggtgtgttcatggcggcgctggacaacggaattatttccgctgctctgacgacgattaacagctcttttgatgtttctccttcatggggatcatggggagtgaccctttacacattgggactcagtgtcagtgtgccgattgtcggcaagctgtcggaccgatacgggcggaaaaaactgtttatgatggaagtcggcctgttcggactcggctctttgcttgtcgcactcagtcagagcttcccgatgtttttggcggcacggctcattcaggcgcttggcggcggcggaatttttataatcgggagttcgcatgtgctggccgtgcttccgaaggagaaacaggggaaagctctcgggcttttaggggcgatgaacggtatggcggccgtcctcggaccgaatatcgggagctttttgcttgatgtaaccggatcgtggcattggctgttcttgattaacctgccgattgccgccgctttggttgtgtgcggcggtttgtttatcgctgaaacgaaagagcctgaggcgaaacggcttgatctcgccggcacaatgctgctgtctcttgcgatcttatcttgtatgatcggtatcacgaatctcgatgggacgaagctgtcagaaagcataatggacgtaaaggtgtatgggtatcttttgggagcggcacttctctttctggtgctgcttaaggtcgaaaagcgggttgaataccgcgggggcgatccgattctcgcctactcgctgctgcaaaataaagtgtttcaatggacgcttgtcatcggatttttatcgggagggctgctcgctgcggtcatttttattccttcttatgcggagcaatatttacacgtatcggcggagaaagcgggttattggatgacgccgcttgcgttggcgtcaggcatcggagcgtggctcggcggggcggtcacggataaaaaaggaccggtcttctccgcggttgtatcaggcgccatcgcctttgcgggcttcagcctgtttccgttatgggtgacggataaatgggaatttgtcacggcgagtgtcattgcggggatcggtttcggatttctgctcggggctccgctgaatgtgcttgtatcagaaacggcgggccaaaacaaaggaacagcgctcggcacgctgtcactcgtaagacaggtcgggctgacgctcgctccggctttatatgccggcttcattacagcgggctttgaccggatcggagaggacattaaaaaccgtttaacgaaaagcggcattcccgctgatcaggcgcaaacgcccgatatcggcggcggactttcttcgttgcaggagcaggtaagccgaatccccgttcccgccgtcaaaaaagcggtttctgatgcgattgaagcgggcatttccagcggctaccaccatctttatacggcagccgccgtcatttcattatgcacgattgtgtctgcggctgttttggcgtttttccggaagccggcatcctctaagacagatgccagcccatccgccgggaaagctcagtaatatgggcgatgtgatgttcagagtgccagacatatagcccgagcgcctgttccagcgtaaccgtctctttagatacaggatggaagtatgtccgtttgaattgggcttccgtcatggagcgcaaaagagcggcccatcttctgtgcaggatcgttaacagctcaagcgcatccccgcaagcggcggttttggaatcatgaagagcggcccagcctttttcatcataggacggatttccggttcattctccgttaagctcaatttaaaccgggtatagccgttcatgtggctgtccgccagatggtgaaccacttggcggacagtccatccccttcgcggtacggcgtatcaagctgactggccgacatcgctctgacagcttggttcagtttagccggagcgtgttccagcgcattgatccattcttgtttctgtccggccgaaatcgattcagccggctgatactctccaatcggatggctgagggtttgtttttccatttttgtctctctcccgctgctcgtattatgaaagtatgatggtgatgtcgcagccttccgctttcgcttcacgaaagacctcaagcacactctcggcgccattttctgtaagctgcttgctttgttcaaactgtctccattctaaaacaagggggtactccacccatccggtcagacagtcccataaagcgtcaaggttttcaccgtagtactcaggaagggcaagttcctttttcaatgtctggtgcaggtcgctcatacttctgatttgctccccgttaataactgctttattcatgcgcggctcctttctcatgattctattctatcagtttaccattttcctcttcagaagtgaccggagtctgccgcggttccagctggacgatgccttgcccgccgtcaacggccaccctgtccccgttttcagttttgacgttgcatttccgcacccgacaacggcaggaatccccagttcccgggcgacgatcgccgcgtgggacaaaggggcgccgacgtccgttatgatggcagccgctcttggaaaaagcggggtccagcctacattggttgtcgacgtcactaaaatttcccccgccgcaaaagaatcaccgtcttccggagcatcaaggacacggacaatgccctccactctcccggccgctcccgcgaaaccttttaaagtatgcgcatcatccgtttccgcaggcataaaagcatcgtaataatccgctcttctgtcaggatcctcagcccatttaaacggattgaatcttccgttaataacggatggaaacggcggcagttttttataggtttcatagttttgctttctcgcttgaatcgacgcaaccgccggctctttccccgcgagcagatcggttatttcatgcagatacaggaagaaaatatcgtccttcatgccggtcatttccgccgctctgagcgcgaatgctctggctgtccggtacactctgacaaattcggatctggttgtttctctaatattcgcgtattctgacgctttttccattttggctttgagccatttgaccttatgaggaaactttttttcaaatcttcggaaggcctgttcatgcgcccgctgctgtttcaaaagcagttgttcggcatcaatacccgactccttgtgttctttgatctgcttcgtcagccaatcccggttttctcccggatgcggtatggaaagttcgtattcatgcgggccacggtggccctggttcctgagatattcttcctcgctcatacggcctttcatgacttgatcaatgccgataatcggctccaggctggccagtccgccttttcccctcagattggaaagcaggagattcgcatcttctatgcctgcgagttttgttaattgagaggttaacgacgaagaggattgcgcagaatcacgcccgccggatattaacgcaaaccacgcgttgcataaatacggatagatctcatcgttccatatcgctaataatgcctgctccgtttcggcgcgtttcagcttttcctcaatattccggcaccactccggtgattcgtccaagtaggaggacatgttttttttcgcttgcttcattttcgacagatacggtttcagttttttcgggatgatcttcaataattcatactttgagaacggatataaaggtatcttcatttccgccgggatttctcccaatgtatcgctcatcatttttccaatttttccgcctttcggattcagaccgaaagcggcgagaacggaaagaggctggctcatattgttataggctctgccgcaaatattgccggaccagacataatagcccggaatgatgcccgactcttcatccagattccggaggagcgaccatgtcagcggcgtcatcacatcgggaatcgcttctcctatatttgtgtttgtccataaaaaatcaccgctgaaagaatcgttccattcataggtttccagatttccggcttgtaaggtcgtaatcgggcgggattgaagaatatacaatgtcccgcccgcggcggcccattcaatatcctgcggccctccaagatctttttccagctttttcgccagtttatagagctttgacgcatatttgcgaaattccccggggccgtcatattttttcttgggccgtgccagtttaaaagaataggcatcggcttccccggaaacgagctgctccccgagaccgtagacgtaattgcctgtcatctcccgcctgctccccgtaatcggatctgcggtaaacagcactccggatatctcagacggtatcatcagctggatgacgattgcgatttcatgctcatcttccattccctgaacggcgctgtacgcttttactctttctgactgtaccgaccggcggacttcatcaatcgccctggacatgtcttgatctgttctgacattcaacaccgtatcgaattctccggcaaaggaagcctgagcggaatcctcgctcagcgcggatgagcgtacggcaaacaacgcagatgcatggcggctgcggatggaattcacatattgatcaacagcctctctcgcctgatggcggagctgtccgtcctgaaaggctgacggcaaaatcacaaacccttcaggcacaggatacccgctttgatacattttagagagaatgcttccttttcctcccgcaaaggaataaagttcggccggaagttctccgaatgttttgacacagtcattcataatgtccccgctcctttttagtcgttcatccaagctcacagtttttctctttttcactttttttgaaagtatttcctataagtatacaatatatcggtcttcacaagggagaaaatcggtggcgttattttgtcataaatgcatccgtcaaaacagccgcaggcgggggctttgtatgcaggatgtacaactatccgtcctcgtgccggataaagcggacccgtatcaaaaaggcggccgaagcgccgcctttttttcagactgtgcggccttgatgcgccgccgtatttcttttggtctgcttcggctgatacactttcccgacaaacaggtatccgtatctgaaatggttgcacccccacgatacgaaaatgggacctagcgtgcagatcaaaaataaaagaaggatggcagccgctaaaggcattgaccgcaaatagccttccagaagatatccgctgattaaaaagtaggagtgcagcagatagattgaaaacgaatagttgctgatcatcatcacaatcgcgggcacttttttgagctttgaaaacagatgaaaacacagaaagatcatactgaccgcgtaaatcataatatccggacgcttagaggaaatggagccgccgctgatatatgaaacggccacaatcaatattgccgatacggccgcactgaagtaaaccgcataacggtactgattgatgagcgataaaaaacgcggatattcctttccgcaataaaatgccagacagaaataaaacacccagcccggaaacggaacccaaaagaacggaaaaatagaatcaagccccgatgatgccggcggatgaaagatggaaaagtaagccagatagacggcgttgatgataaacgaaacagacagcacccacacgggggatgtgttgttcagccagcggtgcagcagcatatggagaatgtaaaattgaaagatcacaagaatgaagtagccgatgaagtttcctaaaaacacattttctaaaaatttaccgatcactgaaacgaatccggctccttcttccgccacgcttttcattaaaatggcatccaccgcggcaataaacagaaacggcacgaaaatgactttgccccttttctttaaaaaacccgctggaacgcctttcgggtatgacctggcaagcagaaattccgaaataaagataaacgccggcgtgctgaacatcaagagggtccgaaacgcatcaaccgtatgggcggcactggctaaggactcttcctgaatcatcagcaccattgaaactgcgtgaagcagaacgacacttaaacaggacaggcagcgaatcacgaaaatttcttttatctgcatgcggccgctcctttttcacaagcgcgccggactttggcgtatgcttggcgcagccatttttcccgcagttcgggtgtgctcgttctgacgacagaaaaaaggttccgctcggctttttgaatgccgcaaaattgcagaatgctttttttcagcgtaatccagtccgagtttttccggaaccactttaagtaccagcccggggagtccgccgtataaaagacctgtgccgtctctgcccggagcagtccttttacgcggccgttttcatatgtgtaggcttctccggcgacaagcactctgtcaaaaaagcctttcataatcgccggaacgcctccccaccacagcgggtagatgaaaatgagatgatccgcttctttcatcagtttccggtatttcttcgtttcagcgtcccggttcatgtcagagcgctttttttcgccgccgtacttcagcacgggatcaaattgatcggcgtataagtcaatgaccgtatagctttggccgctgtcctttaaagccatggcgacgtattttacgagagccgcattgaaactgttctcatccgggtttgcatacacaatcaccgtcttcatatgtccctcccagtatttattaatttttacaatgattatatcatgatgtcatatgaatgaggcaaagacacgagaaaggctttttccagttctgctgccgtttcgataacccctttctgcatatttttgctgattttggcgccgcggattcaatgataagcatccggtgcttctgcgtttttgagcggccgtatggtatactagctgtcaaatgaatgggcttggaggacaacatgagaattttaaagtacgcgattttagggcttttgcgaaaaggcgaattgagcggatatgatatatcgagctattttaaggaagagctcggccagttttggagcgcaaagcacagccagatttatccggaattaaaaaaactgacggctgagggatttattacgtttcgcactgcgattcaaggaacgaagcttgagaaaaaaatgtacacgctgactgacaagggagagctggagcttgctgcctggctgacgaaaaaagacccgattccggaaacggtgaaggatgaatttatgctgaaggcttatttcatctcagctttgacgcaggaagaagcggatgagctattcaccgatcagctcgtaaagcggcaggagaaattgtccgatctggaaaacagttatcaagaactgatgacatcgtccgcggaggcggattcattttcttctcctgatttcggccattatctcgtgctgacaaaagcgcttgagcgggaacggaattatatttcctggcttgaagatattttggctctcatcaaaaaagcataaacaaaacggggcggctctgtatctgcaggccgcctgtttacgttctgaggaccgcattgataaacgaatcagccattaaaataagaaaaagcagactgaaataaacaatcgaataaaaaaacatccccttcgaccattgcgtgtcatccgccgcctgaaagcctttgacgctccggtacagccagatggccccgagcaggagagcggacgcggtataaaacgggctgacgtctatataaagaggaacgagcagcgaaaccgcagtcaaaacggcgatatagcgcagcatttttatttttgtgacgcgattgccttttatgatcggcaaaagcggaatgccggcggcacgatactcttcctttcgcctgattccgatcgcccagaaatgcggcggctgccacaaaaacataatcgcgtataacaaaatcgcgggcatatcaatgtacccggccagcgcgcaataaccgattaaaggcggagccgcccccggaaagctgccgacaaatgtgctccagacggattgtcttttaaaccaaagcgtataaacgacggcatacagcaaaaatgcaagcaggccaagaacggcggtcagtacattaagcgaagcaagcatgatgaatccgcatacgccgagacatgtgccgtacaggaccatgaccgtcggcggtattcttcccgtgacgctggcgcgggtgcgggttcgctccatctttgcgtccatgccgcggtcaaagaagttattaaaaacagtgcttgacgccatgactaacgccgtgccgatcatggcagccgccatggcggcaaatataccgggccctccgtccgtcctttccgactgaagccacgcgatccaaaatccgcctaatgcggcgagtgaatttgagatgataatccccggtttggcaagaatgataaagtccttgaacgtcatccggtttccgttatgcttcatagactgttccgtctgtgctgcatttgaattcatttgtggaggttctcctttttcggcttatcatatcaggaagaatcaggaagtacaatttattttgggcatttttcacacaattgtaaattgtatatgaaaagccgcatcttgtgaccggatgcggctcttccctttttctattcaaagtctgcccatacagctccctgatccgccgaacggacacccattttcaatccagcggatgccctgagttcgggccggcgatggcgggctccacgcgtcatgtttgcgcctcactgagatgttcgctctcttcagtcacacaaaagccgggtgtatattgcaaatcgacgttcttctttcccgagcctttagaaaaataaaaacccttgccggttagacggcaagggttgtttcttacagtgtaaatgcgatatccgccctgatacagggtctttgacgaatacgccctcttctctttcttcgatctcaaagccggcatcggtcagcgcttttgtcacacgtgacagctctttttgatgcggcagcgtgatggtgtaataatccagcccgcttgcatttcccggtttcggcggcgcatgttttccggcccatatattcagaccgatgtgatggtgataccctcccgccgaaacaaacagagcggacatgcccgcgtaattgccgacaatgtcaaaaccgaggatatcggtgtaaaacgctttggcttcctgtaaatccgtcacatgaagatggatgtggccgataacggttccttccgggagacggcttttccgttcagctccggcttcttccaaaagcccgtccacatcgacgggcgccgtttgcatgacgtaattgccctctgcatcccggcgccacgtgctgcggggacgatcggcgtatatttcaatgccgttgccgtccggatcagacaagtaaagagcctcactgactgcgtgatccccctgcccgagcgcgatgccgttttcaatcagcctggccaatgcgatgccgagttctttccggtcaggcagaagtatcgcgaaatggtaaaggccggtgacagaccgctccgggagaacgacggcgctcggattttcttcaagcaccagcaggacgcgttttccgtctgctgacagttctgcagaacgatctgtctgcgagatgacttgaaggccgatgacattccgataaaagccgagcgagcgttccatatttttaatcgtcaatttgacataaccgattgctgtatcttgatgaatgccggtcatttgaacgccttctttcttatgctgaaaaagtttctcccttttttgatttgaaaaggagctgatccaatgaaagcagacggcttcctgaaagcgctaagtgaattgacgcaaccagtaagatgaaatcaaattccgatccgcccataaatggtgaggaaagcttcgccgtgaagatggcgccgactaatgtgacggcaaacagaacgccgataatgcgcgtcgccaaaccgaaaaagatcagtaccccgccgacaagctcaatcgtcgcgatgacgtagaccataaaggccggaagcccgatgctctggaaaaattgcgtagttccttccaacccttgaaacttggataaaccgtgaacaaaaaagataatacctgttacaacccttaaaagcagtgttcctgtttcgaatgatttattcataaaatcctccttgaaaattattatcacttactttatgtaagctagtatatatacataacttatttacgtcaagtaattttgttacatttaacgaaaataacttaaaagtactatttgtcttcgcaaaaaaaagacctccgcactctgtcggaggtctttttccctacctatgattcccggaactggctctcatataattcccggtaaaacccgttctggctgagaagttcggcatgggttcctttttcagccatttcgccgtctttcagcacaagaatctgatcggctttttgaatcgtgttcagcctgtgagcgatgatgacgcttgttctgcccgccattaaacggccgagcgcttcttgtattttcacttccgtcaccgtatcaatgttgctcgtcgcttcatccaaaatgagcagcaccggatccgccagcacatctctcgcgatggaaataagctgtttttgtccttggctgatgcccgcgccgttttgggtaaggacggtatcgtagcctttcgggagccgttcgatgaatccgtgggcattggcggcttttgcggctgcctccacctcttgatcagatgcatccagacggccgtaacggatattttccctgatggtgccctgaaagagaaaggaatcctgcaggacaaaccccatgttttttctcagactggacctcgtcagttttttgatgtccgttccgtcaatgaggatttttccgttattgggctcgtaaaaacgggcgatcaggctcgtaacggttgttttacccgctccggtcggtccgacgaaggcgattgactgtcctttcggaacgctgaaggacagatgttttaagatcgggctgtcttcctgatagccgaaggagacatctcggaattcaatctctcccgttttgatcggctggtgcgtcgcatgctcttcatcttcccgctcctctttttcatccagcacgtcaaacacccgctcagccccggcgatggccgataacatcgtattgaactggttcgccaaatcatttaaagggcgcgtgaactgccgcgagtattctgcgaatacgacaatggaaccgatcgaaatccaccccttcagcgcaaacagcccgccgaccgccgctataatcgtaaagcttaaattgtttaaagagttcatgactttcggaatgaatcccgaaattgtctgcgcccaaaagcctgatgattgtaacgccgcgtttttttctaaaaattgctccatgacgcggtcttccctcgaataggctttaatgaccttcgctcctgatatcgactcttcaataaaaccgttcagctcgccgaggtttttctgctgctgcttaaacaggagtcccgtccggttggtgatccatttaatgctcaaaagcatgatcggaataatcaaaagcgtgatcaatgttaaaagcgggctcatgaacagcatgacggcgattgtgccgacgaatgtaatgacgctcgacagcacttgaatgacggatgtatttaaagtggagctgacattttcgatatcattggtaacccggctcatcaaatcgccgaggcgctgtttatcaaaaaacggtatcggcagctcatgcagatgggtgaacagctcgctccgcattttaaacacggtgctttgcgagatattgatcatccaatagttttgaaaccataaggacaatgattgcacgaggtaaatcccaaacagtatgaacagtacacccgccaatccgtccgtcgtccgtccgacgataaaatgatcaattgctttcccgatgacgaacggtccgagcaggccgaatatggcgcttatgactaccatgatgatcacaagggttaaaagcccttttttctcggctacatacgaccagattctgcgcagcgtgccttttgtatcttttgctttcgcgcgttttctgccgccttcatttgatttgagcggtattttcggatatcggaaaggtttacgaatgtctttctccactgtcagctccctcctttccgaattgtgattcataaatctgccggtacagatgagactgtgccatcagctctttgtgcgtgccttttgccagcaattcgccgtcttcaagcaataagatggtgtcagccttcatcgcggtggttattttctgcgtaataatcagtgtcgtgcattcataggatctgatcgcttgtaaaagcttcgcttccgtttgaagatcgagcgcgctcgtactgtcatctaacagcaggagggacggctttctgataaaagcgcgcgcgatggaaatccgctgcttctgcccgcctgacaaattgacgccccgctgtcccagcaccgtgtcgtacccgtttgacagcttcataatcgtgtcatggatttgcgcgtctttggccgcttccattacttcatctagtgaagcttcctcccgtccccaggcgatattttcacggattgtgcccgaaaacagaagcacttcctgcggcacatagccgatttccctgcgcagcccgcaagcggagaattcaccgatcggtttgccgtctatgaaaatactgcctgaatcagccgtgtacaggcgcggaatcagctgaaaaagcgttgatttccctgaacctgtcgcgcccataatggcaaccgtttctttcgggctggctgaaaaggacacgtgatgcagcgcgtctttttccatgtccggatagcggaaggacacttcgcgaaactcaatcccgcctgcaagcgcccgcgccgggtcgtgccccgttccctcgccgccttctgtttccagcacctcgccgattctttccccggaagccttcgcccgggaaaataccataatgagaaatggcaggacggacagcgcgcctgtaatccgcgtcgcatagttaatgacggaaacgacatcgccgacctgcgctccgccctgagcaatgcttttggcgccgaaccataagataaacaaaatgcagctgttcatcagcagcattaaaatcggcatcgccgcttccacgagacgaaaagcggaaaccgttttttccatcagcttcgtattcgatttcaaaaaacgtttcacttcgtggtttgcacggaggagcgctttaatcagtttgatcgccgtcaggttttcctgcatgatcgtgttgacctgatcaagccgcttttgcacggaccgaaacagcgcgccgcctcttttcagcacccacagcaaaaacaaaagcaaaaccggcaccgtgatcagcagaaaaaaaccgagtttcgcattgacggtcagcgagagaataatgcccccgcaatcattaacggcgccctgagcataaaccggagactcatgaaaagcatattctggacctgcgtcacatcgtttgtcagcctggtgataaacgacgtagatgagaattgcgcaaacgtcgaataagagaaggattgaattttttgaaaaagcccttttcgcgtatcatacgcatagctctggctgatgtgggcggagtagaatgaatttaaaattcccgatgcgaatgaaacagcggtcagtccgatcatcaccccgccccacagccaaaccgtaccgagatcctgctttaaaattccttcgtcaatgattttcccgatcagcaggggctgtatcagctctaccgcaagctcgatgagcatgaaaaacagagcgattcccgccaaaagggaatacggttttacatatgataaagcctttgacatgtgtaagcctccaaatcctttgttcaatattattattttatgcctttccggcaaatgaataaagaaatttggtgtgccgttttttcaataatctgcgaaaaagataaaaccttcccggggaggggaaggttttgaccttattgatccaattgctgttcaatgcgctcccgcatttgcggaacgcctaatccgacaatgacctgaagcgccctgccttttctgacgacgccgtgggctcccagctctctgaaatcggcgtcacttttgacctttgattcatcagcgacagtgacgcggagacgggtggcgcaattggtgacctccgtaatattgtcctttccgcccaacgcttcaatatacaaagcggctgtatcccgctgtgtttcgtctgccgcagccgtttcttttgaagcctgcttccgttctctgtactcctttttcgaatagagctttgtttcctgcccttcctctttttctctgcccggtgtggcgatgttgaatttgagaatgaggaaacggaagacgaaaaagtaaacagcggtaaaacacagcccgatgatgatctggtatacatacgtcaaaccgtggcttgacgccagcgggatccagttcaaggtcgcagcttcgatcaaaccgcctcccatatttccgacgacgcctgccatatacatgacggttgccatggaagcggcaagcaaagcatgaaccgcaaataaaaacggcgagataaaaaggaatgtaaattcaatcggctctgtaatcccgctacaatggacgtcaaggtgaccgggatcaaaaggccggcgacgatttttttcttttcctttgaagccgtggcgtaaaaagcgagcgcgattcccggaatgccgaagattttcgagttgccgtgaagcgcgaagcccccctgcgggaacaattctttcagcggtttgacgctttgagagtattccccgagatgctgggcccaataggtgacgataccgccttcagccacagccggaccgtaaataaacggcgagtaaataaaatgatgcaggccggtcggaattaaaatccgctccaggaatgtgtaaatccacacgccgatcgccccggaagaaacgagaaaactttgcagcgatccgattccggactgaaccatcggccatacgtatgccaccgcaagtgaaatcggtatcataatgaagaaagaaatgataacgatgtaggaagatccttgaaaaatccccagaaaatccggcagttttttatcaaagtaacgattgtgcaaatacacgacaatagatgaaataaagatggcgccgataatattcgtatcaagcgttttgatgccggcgatcatcgtcagcccgctcgttccgccggcttcctgagtcatatcgacatgaaaagccccgccccaaaccgtcagaatcgcattgataaagtaattgaatgtcagataaactgtaagcgcttccaaacaagcccgcgcctgcgcttttttcgctaaggcgacagggatgccgatcgcaaacaggagcggcatttgattaaagacggtccagccgccctgttcaatgacgtaccagcattgataccaaaacccgtcaggatcagccagcggccccatcagcgttttatttttaaacagcgtgctcagaccgacaataataccggaaaatgcaaataataaaacaggcacaaacatcgcgctgccgaagcgctggactttttgcatcatttcacgtgacctcccgctatttatcaaaattttcgagctctttataatcaacatatgcacggaataacgcttcgcccaccagaaaaaacggggcaaatgcgacgatttccgttttatcgcttaacgtcaccggcttgctggtcgcataaagattatacggcgtcgtttgcgccagtacgttgtttttcagattggtgattgaaataaacggaactccctttgcggacagggtccttacctgcggaattaattcgggtgtttcgcctgataaagaaataatgatgaatacgtcatcaaccttaaaatcatcacacatgatattaaactctgtgatgtcctgaattaaaatcagatacttccgccgggatacaaacatccgctgcagctcacgggcgcacaccctctgagccgtccccgatccgtaaacgaaaatccgttttgcttcatctatcagccggcacatctccgtcatatcttttgacttcacgtattttacattggcttcaatatcatccagcagcttttcaaacgtcatattctcgccctcttcaggctgatcctcccatttcagaaaaacacggaattcactatagccgctgaagcccagtttttgggcgagccgcaggatggaagaccgagagacattacaggctttcgccatgtcattgataccgagatggtagcacgtatgtttatgattcaatatatattttaaaatataaaaatcgttgtcatttaatttcgcgtaatgctgattaaccagttcttcaagactcatcccaaaaatccccccgttttctttctattatatagaataacagataaagaaaacggggaagattgtcatcaggaaataggagacgggcttacatcaagctcaggccagtagtccttattagcctccatcagatcttcaagaatcagtcttgccacacgggcattcggcactgtttttgacaggatcagcgcctgccacagcttttgaaatgaccgctcttcccacgcttcagccgtcagtttttcgacagacacctgctgttccatcaggcctttttgaaattgcggtatgttcccgactgagagcggttccggtccgtttgaacctacgagacaaggaatctcaaccatggctgacggatcaaagtttgcgatcgcaccgttattttcaacgattaacagcattctctccccggtgttataagcgatggcccgggcaagatcgacgatataggaagcatgatcatcaattttaatttcactgttctccgatgattgttcgcgcgtaatcatatcgcattggctgaaaatgaaagcttcgcgcccttccatgacttcgttggctctcgtatggttcggatttgattttttcaccatatcatccgggaataagtaatattgcagatatgtgttcggaagcgtatccggatcagccgcctgtacgtcgcgcgcttttttgaaggtgtcattccagcttgcttcagtctgttcggcctccgtcttcggaacgtagccgtattcacggacatgctctttcagcttcggcattaaatcattgccttctcgatccgtgatggacgtccaccagccaaagtggttcaagccgtagtaacggacgttcatttcttttcgtgaagataatccgaggatgttcgccatgcgatcctcaattccgaccggcatgtcgcagatgttcaatatttttgaattcggtctgaggcgccgtgtagcttcggccacaatcgccgccggattggagtaattcagcatccatgcgtcaggcgagtacgtttccatataatcaagaatctccagaacaccgccgatagagcgcatgccgtatgcgattccgcccggcccgcatgtttcctggccgaccacgccgtacttcagcggaatttgttcatcgagcgcgcgcatcgcatattttccgacgcggatatgcgccatgacgaagtcaacatccgtaaaagccgtctctgggtcatcagtcgccaaaaattcaatgtccggcgctttttcttttatgaatacctcacacgcacccgcaatccgctcctgcctttctttatcattgtcataaagtttcagctttctgatcggaaactcttccaggtgattcaaaagcattaatacaattccgggggtaaatgtgctgccgccgcctgcaataacgattgagaatgatttgtctgtcatgtgaagccctcctctgataacgtttacattttatttatatcatgagaaggtccgatctgtaccgggtttgaaggagttagatcatttgatcatttttagttatttttctcaaaaagcgggaaagttcccacaggtacgaaaaaggcctgctgtcatcagcagaccccttctcaaaaatgctcttgtaaatcagaaagcagcacttcctgctcaaattgtggatttccgatcggaaaaatcctggctgtttccttgtcttcgttgacatgctgaatataaatcgggactccttcatacgtcacatacgccatggcggcggattccgaaatgtctttcgcacgctgtgtattcacgtctcaaacctcctttagtcctcacacataacgtgtccggcacccaagagaagtatgcttgtttcttacaattgtccggcggtgagtttgaattttttgaggcgtttgtaaaacgtgctccgcgggattccggccattttagcagccagcgtgacattccccttcgctgattcaagcgcgtttacgatgatgtttttctgaatgtgctcccggatggagacagaggacgcttcttcctgttcataagactcggccgcttctttaagacctgacgcttcaagcagggctgcgatggggcgccctgacagccgtccgtccgggaacatgacggaaagacgttcaaatacattaaacaattccctgatgttccccggccatttccggctctttaatacgtctaaaaagtcaacaggaagctcccccgccagccgcgatttcgctgaaattcaaggaagagtccgggaatgtcttcggtgcgttctcttaatggagggaggtggatcggacagacgtgaagccggtaaaataaatcttctctcagctttttgcattcgacaagctgtctcagatcagtgtgggtggcagtgatgattctgatgtcaacgggaatctcttttgtcccgccgaccggggtgactttccgctcctgcagcacccgtaacagagccacctgcatggagtgtgatatttctccgatttcatcgaggaaaagcgtgcctttatcggctttttgcaaagcgccgctatgtcctttccgtttggccccggtgaaggcgccttccgagtagccgaacagttcgctttcaatcagcttttcggggaccgctccgcagttgacagcgataaacgggccgtttttcctggagctgttgttatgaatcgcccgggcggcaacctcctttcccgtcccggtttctcccgtaagacaaacggttgcgtccgttcgggcgacaagctccagctgctcaagcatatgtcgggatgacgggcttttgcctgccgcaccatgaaatataaacgacggcttttcttcccgtttggataagtaaacgcatgtgaagccgttctcctcccgcttcgtccgcttgatatgatagccctgttcctcaagctcgcgcagcatatgtccggtaaaatgctgaacgggacggcttgcggcgataacccggctcatttcattgcaaagcacgatcggatcatgagaccgggtaagcccggcgaatttgctgatcatgtcaagttctgtcattttgatctttagggcaagctcccgttccgccgtataagcgatggaggaggcaattccgagcataaaaggctgagcgcgggcggcggggcaggaaatatcaatgacacccgccagccgcccgtcttcataacggatgggcgcggcggaacagctccattgatgagaagcgagcgaataatgttcagagccgtgtatcatgaccggttcatttgtataaagagccgtcccgatcgcattcgtgccgacggccgtttccgtccagcgggcgccttttaagaaattgatgcggttcgcttcatgaatggtgcgcgggtggccgtcaactgaatggacaacgccgtctgaatcaatcaggagaaccatcatttccatttcccgcatcgctgttttcattctttctgcgtgcggcattgaggccgctaaaaataacgcatgcttttcggcctgcctttctaaatgatctgccggcattacattcggtcccttttctagataagggttgacgtcggcttttttgcagcggtgccatgaggcggccacccgcttctgaatacgggattcatcgagcacgccttctttcacaaagcgcttccaggttttaaaatcattccgaatgacattcattgtattcgctccccctgttcagaccatcttttcatatattgtaggggaaaagtaaagcgctttcaacgaaaaataccccttctcatctgagaaagggtattccggttatacggaatgcaccgcaagtccggtgacattcagcagggcttcctgaagcgtttctgacagagtcggatgcgccgcgataaagtgctccgacatatccgccgtcatttcaccgttcatcatcatgaccgcctgaccgatcaattccgtcacgtccggtccgatcattgacaccccgacgatttctccgaattccggctcggcaatgattttcattttgccgccgtgctgatgcttaattaacgcttttccgttagcagaaaatgagcattctccgattttcacatctccgtatgtctctctcgcctgtgtttccgtcagcccgacagctgccatttccggcgatgtataaatacagcggggcaccgcccgcatattgactttgctatcctttcccgaggcatgcgcggcggctgtgattccttcatgaatggcggcatgcgcgagctgcattcctccggccgcgtcgccgcacgcatatatatgaggcacattggtctgcatatggtcattgacttcaatcccgcgcggagaataccggatgccggcttgatccaaattcagcccttgcaaacgcggttttctgccgattgcaaccaaaatgtgatcagcctgagcttcaatttcttttccgtcttttgtccacacggcggttttcctttctttgtcaatccgctgaagggcggcttttgtctgaatatcagccccgctgtctcttaaagagtcttcgaaaacggcggcgatttccctgtcttctgccgggagcagccggtcagccgattcaatcaccgtcactttcgttttaaaccggctgaataaagaggcaaattcgcagccgatcacacctcccccgacaatgagcagagacgaagggattttctgtaaagaaagcgcatctttgctgtcgattacccaatcgccgtcaaatggggcaaacggcagctccgccggttcagatccggatgcaatcaatatccggtccgcttccagaatgtcttttgcgcctccttcttcttcaacaagcaatgtctgctctgtgagaaatgaggctgtcccgctgatgactttaatctgatttgctttcattaagtattgaattccctgcacgagctggctgacgatttgccgtttgcgcccctgcatgcggttccaattgagtgtaatgttttgcggcagttcgatgccgaatgtatttgcatgcctgattttatcgagcacattcgcactttccaaaagcgactttgtcgggatgcacccctcattgagacaagtgcctccgagcggccctttgtcgatcagaacgacttctgctcctctccgcgcggcagtcacggcagctgcatatccggccggcccgccgccgataatggctagtttcattttttcacctctctctataaaatcaaaccggcaggctcttcaagcagcgctttgaccgttttcaggaagtccgcagccggggcgccgtcacatactctgtgatcaaaggtaagactcagcggcagcatgatgcttttgacaagctcatctcctttaaacgccggcgtttcatagcttgcgcccactccgagaataccggcttcaggcggattaagaatcggggtgaaatgctcaattccgtaacccccgagatttgtaatagaaaatgtcgaaccgtggagatcatctccggaagcattgccttcccgcgcccggcgtgccgatgtgctgatgtgatccgcaagctcaaggaatgaaagcttttccgcatcccggatcaccggcacgacgagaccgttttcaagagaaaccgccatcccgaggtggacatatggataggtgatgatccgctcctcttgataagagctgttcagctcaggatgctgtttcagcgcaagcaccgcggcccgggatatgaaatgtgtgaccgtcagtttaacaccgctccgctttttcgcgctgtcggcgagctgctgctgccattttacaagctccgtaatgtccgctttcatcgtcagcgtcagctgggcgctgttttgcaggcttttgtgcattcggtctgcaatcacttttctcatcgctgaagccggttttccctccggctgtgctgtctgaaccgaagactgcggttcagcttctgtcttcatcgccttgatgacgtcagcttttacgattctgcctccgggccccgtcccgttcagcgtatcgactttcaacccggctttctccgccatttttctggcaacgggagatattttcacgcggtgtttgcgcttttgcccggcttttggagcgggaatatgttcaggttcagcttgcggtttccctgctttttcaggagccggcgcctccttctcccgcacttcttcgccgttttccccgatataacagatgggcgttcccggcgggactccttctccctctttgactttaatgtgaagaagcgtgccgctttcaggcgcttctatttccatttctattttttccgagttgatgctggcgatgctttctcccttttctaccgggtcgccgacttttttattccagacggatacttcacctttcttcatcgccattcccagcttcggcattactacttttacagccattctgtatccctcctttaattcattgccggctcgccaagcaattcaagcgtgacgctgacaatttggtctggtgtcggcaaatattgatcttcaagcaccggcgaaaacggcaccggtgtatgcggcgctgtaatccgcttaatcggtgcatcaagcaaatcaaagcccttatcggcgacaatcgcagcaatatccgtggcgatgctgcagcgcggattggcttcgtcaatgatgatcagccggtttgttttttctaacgatgtgaaaatcgcttcctcatctagaggagacagactccgggggtcaagcacctcggcgtcgatgcctttctcagaaagctgtgcagccgcttcaagcgcggtattaacctgcttgccgaccgcaaacagcgtgatgtcgctgccttcgcgtttgatatccgcttttccgagcggaattgtataataatcttccggcacctcgcccttcatgctgtaggacgttttgtcttcaaaaaagaataccggatcattgtcttctattgccgccagcagcaaacctttggcgtcatacggattggacggcacaaccgtcttcagccccgggatgctggtgaacaggccatacagcgcctgcgaatgctgagcggctgcccggaacccggctccgtatgtggtgcggacggtgatcggcacttgcgctttaccgccgaacatatagcggaatttcgccccttggttaatcacttggtcaaagcacgttccgataaaatcattaaacatcagctcggcaatcggtctcagccccgtggatgccgcagccatggccgcacccatatagcccgcctcagaaatcggtgtatccagcactcggctgcgcccgaattcctgtacgagaccctttgtgaccccgagtaccccgccccatgcctcatcatcttgcaaatgatcgaccgccgctcccccggcgacatcctcaccgattacaagcacattgtcgtctcttctcatcgcaagcttcattgcttcattgatcgcgtccgacatgcttatgactctcgccatctcacattccccctttttcatatgacacgtagacgtctgtcaacagctcagactctttcggataaggactcttttcgctgaacgagacggctttttcaatcgattcgctgactcgctgttcaatgtctgacaatttatttgcatctgtttcttttagaagatagtttttaaagccttggatagcatccttttcttcaagatgctcagtcttttcatcctttgttttataagtttgggcatcgccttcgaaatggccgtagtttctgtaagtcatacattcaatcaaagacgggcctccgccgtttcttgctctttctatcgcttccccggctgcctgataaaccgctaaaatatcttttccgtccaccgtgacccccggcatgttgtaggcagccgcccgatcggcgattgaatcacaggctgacgcgtactcaaatgtcgtggcttcgccgtagccgttgttttcggcgatgaacacgacaggaaggttccatactgccgctaagttcagcccttcatggaaggtgccttggttattggctccgtccccgaaaaagcaaacgcttacatttttagtttgtttatatttagccgtgagcgctgatccgcatgcgagcgtaaatccgcccccgacgattccatttgcgcctaacatgcctttatcaagatccgcaatgtgcatagaaccgcctttgcctttacacagtccggtcgcttttccgaatatttccgccatcatgccgtccagatcacagcctttggcgatacaatggccatgtccctgtgtgtgcttgtaatgctgtcgccatcatctaaatgagcgcacacccccgcagctaccgcttcttcaccggcatacaaatggacgaatccgggaagcactccttgcgcgaaaagttcatgcactttgtcttcaaagcccctgatttccagcatcttttggtacatccacagcgctttttcctcagttaatgacaagccttctcgttttaacaattccattttgtgcgcctccttctatttagggttcacacttataaatgcaagaagcatgccagcctttgaagcccgtaaaatgaatgtttttattttttcaatggagacagtttgagacaggtgtctcattttgtctcgatccgttccctttgtctcgttttatggcatacaaaaaagaccgggcatcaccctgtctttgacaatgatcgacgtatttatttcctcggaaatcttttattgcttcattcttccgcatacagtctatcacggcgtttgagtggttacactctttttttcatatccacgcgctgcagttcatccttttcttcaacagcccgattcagtgcttgaagcatgtaaccaatgcctttatacgatgacagaggccaggtgatatgctgatgctctccgatgacggcgtttagaatgcttcggtattttttcccgccaagcatgacaagctcttcgacgtcggaaaagcctttttcataaaattgacggcgcagctcgtccgctgccatgatctccgggtgaccggttccaaaagtgacatcgtaatttccgggaacagtatcatccggacgaagaaatccgtgcttcgccgacaaaatcacccactcatcgaaaaatgctttcgcatatcgctcgcatgcctgatgaaacgggctgagataagcgtcttccgcccttaccggccctgtatctgaatggacatcccaaatttttttcttgccgcaggggatgatgcacagtcgtttcatttttctctcccctttatgatgtatctcctatcaatgtaccattattcgtttatttctgcatgacgaaaccggccatggatctgtctgggtaaaagctgcacacaaaaaggcccggaattcaaaccgaaatccgggccggatgatgagttgtttatgtcactcttgctccatcccatcaagatactttctctcaaagtcatcgagcaatgcacgcacttcatctgttgactttgtattcatgcattgatttcttaattcacttgctccccggaacccgcggagatatatcttgaaaaagcgggggagcggtttatatgctctggcttctgcttttgaatattcatcatgaagatccagatgcaatctcaaaagatcaagcaattccttactgctatgctctctcggctccttttcaaaggcgaacggattagtaaaaatgcctcgtccaatcataatcccgtcaacaccgtattgttcagcaagtttcaagccggtttcacggtcaggaatatccccattgatcgtcaaaagggtatccggcgcaatctcgtcacgaagtttcttgatttccgggatcaactcccaatgcgcatctactttactcatttccgctcttgtacgcagatgaatggaaagattcgcaatgtcttgtttcagtatgtgtgtcagccagccgcgccattcgtcaacatccgtgtagccaagtctcgtcttcacacttaccggcagacctcctgctttcgccgcctgtattaattcggctgcaacttcaggacggcaaatcaggccgcttccctttccattccccgccacattaggtacaggacagcccatattgatatccaggcccttaaaccctaattccgccattccaatactcatttggcgaaagttttcaggcttatctccccatatgtgggcaaccatcggctgttcatcctccgtgaaagtcaaacggccgcgcacactatccttcccatccgggtgacaatagctttctgagtttgtaaactctgtgaaaaacacatcaggtctgcctgcttcactcacaacatggcgaaaaacgacatccgtcacatcttccattggtgccagtacaaaaaatggccgcggtaattcacgccagaaattatctgtcataacaaatccaaatcctttcatgatgggatacagtgaaacctttatcccaaaattaaaaactgaccatgcttcttttacacttatagcatgtgtcagcacttcttatcaaacgatagtaaattttgaacatttcactttttacacgttaaaagtaaaaaagcaaactggagtagaacacattaattgagctaacgtaatagactaccgctatagtcaaccccatatcgtttatttctgatcaactcagtcaactccttcacctttaaaagggtttgagagagaaaaagtgtgatgattatctacacctaatttttatttatattgtggtttattaagattagcgctgaccttcatctttcttagcggccttacttttgctctttttggataaaaaggattccaacctaaatagaatatcatatgagttctccctattaccataaaacaaatttcaagaaataagttgattaagcaaatggggctggggggtatatctgagtactgaaaagaatgtaaaaagaaaaagccttaacttgccgcttgtgaatcacatggagtaaagaggatggcatgggaaaataaactcgaacttaacagaattcaagaacttcaatctggatcttttcggatttactcatggtctagaaataatcaacgccgcaagtggcttggctctatacagtatatgtactaagggttgatcggcttttaaaccccgtatgttaatatctttatacaatcacctatatatatttgtataaggttacgcttcggtaatcctgatccaaaaccaataaaatagactgctgactaagtgccgcagtcttcattcataagattaattagaaagtgttcatgttctttcatcattaaataaggcatcagaagttattgctttcatttcggatattctttgttatacctttaatgatttgtataacagtgaaaacccccaagaaaacagtgacaatattaaaccatggattatcatagaatgaaagatatgtttgaaagaaatccagttcagctatatttgctgggaatccattcatttctctataattaggaccccatcccgttaattctacaaagttaaaataaagctgtgatactaaaaatgccaacaacgtgtgaaaccaacttcttttatatactttacccatttctttatccatttccttttctgcaatactttttagcctagtgtcaatctaacatcattatatgatgaagcatgattgtcgcaataattacttattaaggatataaccatcgcaggtattactgtaatagttgttatcacttgcgtttccgccttatatttattcctttttttagaacaagaggaatagttggggtccttttcctgtttaggctttcatattatatataacgaccaaacatgcttttttagtgtatttgatcttttatcgacagttgttgatatgccaactgccgctgtgatttagtgaaagttagcacccttgccttttacagcttctacttcagaaccttcgttcagttgttgaaatctcaatatctctcgttcggtttcacctcctttttatcatttattaaagacctacttactttggcatgataaatactttacagttgaataatgttacaacttcatctcaaaccaatgatatcaaattattttacattatcccattaatgtcacaataaaccacagcgtcattatacaaacgaggtcaaaattggctgttttctcctcgcttttccacacgttttttcaactcttttcatcagtttaaattaaagatctccgagaaaagaaggaagataaacagccagggcaaaggctgcgcataaaaaaaaccggaaatcggaaatgtttataccgaaatccaggtctgattacgaattgtttattttagttagacgatttcaacacaagcttcgccacagcttccacatgggccgtctgcggaaacatatcaacaggctgaatatattcgacgcgatagtctttcgacagcgcctgcaagtctttcgccagtgtggaaggattgcaggatacgtagacgaagcgtttcggttttacttttttgatggtatctaaaaatgttctgtcacagcccgttcgcggcgggtcgacgatgaccacgtcgggacggaagccttctttcgtccatttcgggagccagtgttcggctgttcccgtgacatatgccgcgtttttgatgccgtgttttttggcgtttttcttcgcatcatcaattgattctttaatgacgtccatgccgcggatctcttttgcgccgcttgaaacccacatgccgatcgtaccgacgccgcaatacgcgtctacgactttttcttttcctgtcagctgagccgcttgtttcacttcgtcatatagcttgaccgtctgctcagggttgagctggaagaaggcgcgggcgctcagttcaaatgacacgtcaccgagcacttcttgaatggcatgtcttcctgccagcgcttttgttttgtcaccgaaaatgacggatgtgcgcgcgccattgacgttttgaataatcgatttcacttccggcagccggttctgaatggctttgacgatctcgtctttattcggcagtgtctctttcgcggtgacaagcacgacctgcacttcgcctgtttcaaaaccgactctcgtcacgatggtgcggacatcgccttttttggtccgttcgttataaacggatacgttgtgtttttccaaaatacggcggacgatacccgttgttttgtttgtcgccggatgctggacaatgcattccttaatcgggacgattttatgggaatcaagtccgtataagccggcaatgatgctgccgctttgcgagcgtccgacttggaactggcttttgttccggtaattccaagggttgtccattccgatcgtatctttaatgttcatttcttcgacattgaatctcgtatgacgttccagagactgaatgacgatgtcgcgtttttcgcgaagctgctgggtgtatgccagatgctgaagctgacagccgccgcactggtcgtagaccgggcatggcggcgtgacgcggtgttcagacggcttgcggatgtttttgacgcgtgcttctgaaaatttcggctgcacatttgtcgcttcggcaacgacttcttccccgggcagagcgccgggaacgaagacaacttttttcttaaaatagccgacgccctctccgttaatgccgagacgtttgatggtcagcggaaatgtctgcccgattttcaattcggcaggcgcctttttttgatgttgattcacgtttttttctctccgtttctatataaagcctttctcctgggaaagcggctgatttgaaatatcacatcttttcagtataacatgcagccggcggttccttcatgtttttcactggaagtttccaaaaaatgatcaaagcggtttttcattcaatacttctccacaaatataaggacgcatagcttaaatacggcgcccattcgctgcttacctgaagcatcacgtctttcgacggtttatcctcaagggcgaagcggcgtttgatggcattttgcaggccgatatccgccaaaggaaacagattcgggcggccaaggccgaacatgaggacgttttggacggtccacgggccgatgcctctgatggtgatcagctttttcataatgtcttcatccgataaatgggtaagttccgccagattgagcgctccgtctgcaatcatgcgtgaaatgtcaatcgcatattccgcttttctcatgctgaactggagctcccgcaagtcctgataatcaagcgccgcgatcgttttcggctcgggatagcaccagacgccgtctttttgttcaccgaaggcatggacgaaccgttccgttaaggtaaatgcgaaagacaggttgagctgctggtggatgatgcatttcatgagacagttgtagacgtcatattccaagacgagcggggttcccgcatgctcctcaaaaagcgccgacagatttgtttttgagaaatgatcaagcacaggctgaagcggctgttcccattgaaaaatgtgtttgatccgttcaatcatctcctcgcggtccgtttctccgctgacgaggaagaccgggtctgcggcggtgccttccgcttgaaccgtagtgacggacagtttgccgtcccgtgttctgagcggcactttgattgatcttgcatgaagatcgaccgcattcagcggatcgagcgacagcctctcaaggactttatcaaaatgatacggcggcgtgaccgaaaccgtttccttccacatatgctccacccctttttgtccaagtatatcatgaagcgggcgggcggcaattcgtatacttttcttcataacgccgcatgatataatggcaggcggagggttgtttatgatacatataaccgcaatcacaacacataatgagatattagataatatccccctatcacgtacagaacaaccggacatcgcatggtactggatcgattttttcggcgctgagatgcatgaaaccgagctgctgcgggattattttcactttcatccgcttgcgatcgaggattgctttcagcatatgcagcggccgaaaatcgaccattatgacggctaccgtttttatgtgctccacgccttgaacccggacacactggaaatggaagaggtggacatctttcagtccgaccgtttcatcgtcagcttccatttgcacgaatcgcccggcgtctcaagggtgagagaacggtttttcgcttctccgggattagccaaaaaagggccggggcacatcacttatatgattatggatcagcttgtcgatgaatatttccccgtgctgtacaaaattgaagaccggctgaatgaaattgaagacagcagaacacataaatcttacggcactttaatgaatgaagtgtttgaattgcggactgatcttttgaacctgagacggacgatcattccgatgcgcgatttaatgtaccggattttgagccttgaccatgtaaaagaaagccgtgaaacgaaggcgtatttcagcgatatttatgaccatctgttaaaactggccgagctgatcgagtcaaaccgtgatatgacgtcagatttgcgggacagctatgtgacgctgaattcaaaccggatgaacgccattatgatgacattaaccatcgtctcgaccatttttatcccgctgacgttcatcgcgggggtttacggcatgaatttcgataacatgcctgagcttcattggaaatacgggtattttatcgttttgggcgtcatggccgttcttgtcgccgccatgctgttttggttcgcccgcaaaggctggtttaatattttcaagtaagaacggctgccggctgttcttttttttgagaaaacatgatagtctggaaaaaaacgtaaagaggtgtgcgccgttaccatcctttctcataaaatcatttcttctgtcctcctgcttttcagtgtcatgtccattgccccgctgtataacggccgtacggtgtctgattacatctttgagtcgctcggcttttcttcctggtctgaagacggagcccatatctccgtcattcccggggtcgtcctttactttgcggcgttaatctggtgtgccgccgcgttcaggcggacgcttccctcggcggggctgtttctgatctttctcagtatgggggccgcttccggtatcagtcctgccaccgaatatgccgctttttccttaaaacagttcgcgcccgaaaaagagtctgtcgaatatttgaagcaccgcagcgaatgcagtcatctgattgaacgaaaaagagcgggcatgagctgcacgctttatatcaatcattacggaaaaggggaacaaaccatttctgtcacgccggatttatcagaaaacataaaggacgtcacattcaaatcaaaaacattcactgtaaaaccccgttcaaaaacaatcatcaaaacccgatttaccggattttataaggggacagccgcctcagactccggatggtcttcagaaccggaactgaaagtggcaatcctgtacacagcagaataaccattttgcatgtataatggtggaaaacttttcattggagggactgtcaaatgaagatcgccatcgtcggactcggcaatatgggccgccccatcgccgaaaatatcatgaaagccggatacagcctgactgtatataaccggacgaaagaaaaagcggctgacctgctggataaaggggccgaatatgccgaaacgccccgccaggcagctgaacatgcggacattgtgctttcaatgctgtcagacgatgaagctgtaacaggcgtgacgttcggagcttgcggcattattgccgggttatctgaaaacggcattcatatttcaatgagcacgatcagtacggcgctgtcagaacagctttccgccgcacattcgggcagagggcagtcctttattgccgctcccgtcctcggccgccccgatgccgccgagaaggccgagcttcgcatcatcacagccggaccggcagaagcgaagaaaaaggccgaaccgctgtttaacatcctgagtcagcaagtatttgacacgggtgaagaaacaaaaacggcaaatgccgcgaaaatcagcatcaatttcttgctcgtttctatgctggaggcgttatctgaatcattcttaatgatggataagttcggtttagaacaaaaacaatttctagaaatcgccaacgcactctttggctctcccgtctatcaaaattacggcacgatcatggctgaggagaaatttgagccggccggcttcaaaatgtctttagggctcaaggataccaatctggcgctcgccgccgcagaacaggtttccgcaaaactccctcttgccgaactggcgaagagccattttgaaagcgggatcgcacaaggctgcggagatttggattgggcggcattgattaaatgtatcaaataacaaaacacctctccattaccaggagaggtgttttctacaggcgcggcagcttcatttctttctcaaacatcaggtcatcaatgcttttaaacgtgtagccttcttttttcaaatcggtaatggcatcgtccagagcttctgaattgtcctttgaaacggtgtgaagaaggtagatcgcgccgggatgcgcctgctttatcatgtgatcataggcgtattgttttcctttttgctcgttaaccttccagtcgacaaatgcgacggaccagaaaaccgtttggtagccgagacgcttcgtttctttgaggacatattcgctgaatacgccgcgcggcggacggagatacaggttgtcccgctttccggtaatgttgtacacagcttccgtgacggaatcgagttcgtcttgaatctgatcgcccgtttttgtcgtcagatcaggatgatgaaaagaatgattgccgatgatatggccttcctttgacatccgtttaatcaaatcaggctgctctttcacaaaatgacccgtgacaaaaaaagtgcccgtgacgtgatgtttttttaacacatcaagcactttcggggtgtacccattttcatatccgttatcaaacgttaaatagatggtcttttctttcgtattgcccaaataaaaggcatcatattttttgaccagattgtccagctgtctgccggcatccggcggctgatgattgacgctgcgtttaaatccccagtttatccgttcattcggcaccgcttctgcgctgttgatgcctcctgcaagtaaaacggccatgcagcaaattgaacaaaaccatttcatgaccagcactccttctgcatttttccttattttgcagtaggccctgcccttttatacagccgcattatggaaaaagaaaaaccccggcatccgccgggggttattcccaatcctttttaaagcgttcgtattttgcttccagatcatcaagcatgccgatgagccggtctatatcttcaacgtccgttgattcagggtctaatgaatcaatgacattcataaacatatcgagtctgttcttcaggtaatcgagctgctgatctttgctgtttactgcattccccatacttccactccattcattttttataatggtagcgtattttttggcgtttttcaatggttccgctacttgcgatcttggcagatcaggtctaaaattaacagttggcagacgttagtatgcccatttataaaggagttagatagtcatgacacaaaacacagcactgcgtccgattacaccggagtacgatccttgggaagcgtacatggatgtcgaccagtatggagatatgaaactgacgaacgttgaattcacaacgacgactttgtgcaatatgagatgcgagcactgcgccgtcgggtacacgctccagccgaaagacccggatgcgctgccgatcgaccttttattaaagcggcttgatgaaattcctctgttgcgctctatcagcattacgggcggcgaaccgatgctttcgctgaaatcggtaaaggaatacgtcgtcccgcttttgaaatatgcgcatgaacgcggcgtgcgcacacagatcaattcaaacctgacgcttgatatcgggcgctacgaacggattattccttatttggacgttcttcacatttcccacaattggggaacggtcgaggactttgccgacatcggatttgcgatgatggagaagaaaccgacatttgaacagcgggcgcgctattttgataaaatgattgaaaacagccgcacgctggtcgaagcaggcgtaatggtttcagcggaaacgatgctgaacaagcggacgctgccgcatattgaacatattcaccggcagattacggaagaaatgaaatgccagcggcacgaagtccatccgatgtatccgagtgatttcgccagcgcgcttgaatcactcagcctgaaggacatgagacaggccattcatcatctgctcgacattcgcgatgaagagacatggatgctgttcggcacgctcccgttttacgcatgcagccctgatgaagaagaccagaagctcctccgccgcctgcgggaagcgaaaaacgttacggtgcgaaacgaccctgacggccgctcccgcctgaatgtcaacatttttgacggaaatatcattgtcacggatttcggcgatacaccgccgctcggcaatattaaaacagacagccttcccgatgcatatgacaagtggagacagacgaagctgagcaaagagctgaactgccgctgcacaaacgtccggtgcctcggaccgaacgtccttgtcaaaaacagttattatcaggacacggatttttcattacgaaaagccagaggttaacagaagatggaaacgacaattacggatattttgaaaagcaaagtggttgagatcatcatcgtcgctctcgtgctttacgccggtgtttttctgatcaaccgctttgtccaggtgttatttaaacgcatagatttcttggaggaacggaaagggaaaacgattgaaagcctcgtccgatccatcacccagtatacggcgacgatcggttttatcttttacgtcatttcgttattcgttcatgatttcggccgaattttagccggggcgggtgttgccggtatcgtcatcggtttcggcgcccagtcgttaatcaaggacatattggccggtgtctttttgatatacgaacgccagcttcataaaggcgattacgtgacgattaacaatctgttcaacggcacagtcgaagaaatcgggctccgttccctccagatccgtgagtggaccggcaagctgcttaccatttcaaacggtgaggtcagacagcttcaaaactataatattgattttatgcggattaccgagtccgtcgtgatcagttataaagaagatcccgagcgggtatatgccgtcttagaaaaagcctgcgacatgctcaatgatgagcttcgcgattcactgaagcgggatgaatttctcaatgcgacggagccgtttcaagtgcatggaatcatgagcctgaacaaattgacgagaggcatagaatttaccgtcaaaggcatggttcaagataaagaatacttctcggcaagccttgcggtgagacgcgttcttgcccgggagctgtacaacaacaatgtgcaattgcttgaggaaatgtatcacacacaaaaaagctgattcccgaaccggaatcagctttttttatttatctcggctgcgctgtcatttgaaaaccgaatgtgacgtgatcctgcaccggaatccaagccccgattccttgcgaagtcacatttttgacgacaagtttccgcttgctgcctttcagcaccaaatacacttcaccgtatgttacttttcctttttcattaacggccggagcgtaggcgtgcaggtagccgagccgctgcggagaaattttgtaggtttgatcgcgttttgtgcctgcgccgataaccgtttcaaacgcgagcggcagttttgttttcttcatcgctttttgcatcatcatgctttttacgtcttctgcgttcggcaccttcgctgtgagcccgcctttaattttgtactgctgttcttgggcgtatgagataaccgcggtttgctgtccgccccggttatccgctctgttcgtattgatttttttatattcccagttggcgaccgtttcgttcgattgatagccgagcgcccatttcccgagaaatattgtcgcccggtagccgatggcaagcggtgaaccggaaaccgaggattcattcagcatttttatcagatgcggattttcgatgttgatctcggatgtatctaacaattcctttgccagtttgctcggctgaagcatcggctggtcctgtgaagcattcggatacgtattttcctttgaaatgcttacaacagagttgggaaccttaaacggtttctttgcaccggcagacggcattgcgaaaaaactaaaggataacagcagaatcagtgtggcatgaaacagctttctcatcatatcactctttctatagcattttcctttagtcttttcctccgcaatcgttgttatccgcattttttacaggttaaagcaggaaaaaaccgatcgccatgatgacataagcggcaaggagcgtagccccttcaaaccagttcgaatcgccgtcatttgaaatcatcgtcatcaaaaggacggatgatatcatcgccacaagctcgggcaatgtgaatacaagcggcatattgaccggaaaaaagatagaacagatcacaagaaccggggctacaaacatggcgatctgcaaagtcgaacctaccgcgatttcaacggcgacatccatcttgtctttgtacgccataataatcgccgacgcatgctctgcggcatttccgacaattgcgacgataatcaccccgataaacagctcgctccagccgaactgttcagccaccgcatgaaacgtatggacaaggttttcagatatgtaggcgacaataatagttgaaataaataagacggctgtcgctcttttccccgaccactctggctgctcctcttcttcctttgcctccggctgattcggctgataaacaccgcggtgagtgacgagcttgaaataaagagctgccacgtacaaaaggatcatgatgatgctgatgccgacactcaaatcaagcttgtttttttcccccatatctatggaaaacacttcgggaatgacaaaagctacgataatggcaaaaatcagcaggcctgaattatgccgggcatcatgaatattgaattcctgccgcttgtatttcaaaccgccgataaaaaatgacaatcccgcgacgagcaaaagattgccgagcaccgaaccggtcagtgaagcaagcacgatgcccgtcagcccttcttttaaggcgaaaatcgatataatcagctctaccgcattgccgaacgtggcattcagcagaccgccgatccgcggtcccgcgataatggcaagagattcagtcgctctccccatataacttgcaagcgcaataatcgtcaagcaataaataataaacaaaaccgctgacggccagtgcatcaggccgccgatgactgaaagcggcactcccgccgcagccgtaaagaaaaaaatccgattcatatctgcctggctccttttttcgaataagtctttttatatccttctcaaaaactccttcaattacacttcctcggcagcccgaattggcattttcaggttgccggacgcggcaaatccgtgtacgatcaagaaagatactgaagaaggagaaatacgcgatgtcacgactgtacttctttattttggttctgcttgtttccatctccggattttcccaaggcatgcttctgccggtgatctccgtcatttttgaaacgaacggagaatccgcagccataaacggacttcacgcaaccggcctttatatcggcgtgcttctggcgtcgccgtttatggaggccccgctgcgcaagctcggattcaaacctctgatggtcatgggcggatttcttgttatcatcagcttattcagttttatttggcttcaatccatatggttatggttttttcttcggctgcttatcggaatcggggatcatatgctgcatttttcaacccaaacgtgggtgacttccaagtcaacgccccgaaacagaggaagaaacatttcgctgtacggactgtccttcgggcttggattcgctgtcggcccgttcatggtccctcttgtgaaaacaagtccgtcccttccgtttatcgtatccggctgtatcagtctttgtgcctggctgtttgtgtttgccttacgtaacgagtacccggcgcaaggtccggatgaaacatccggggacaacagcgcaaaacggttttaccgcgcccttcttttcggctgggtcgcttttctcccggctttcgggtacggttttttagaaacggcgctgaacggaagctttcccgtgtacgcccttcgtttaggcatatccgtggatgccgtcgcgctgatattgcccgcttttgccatcggaagtattgtattccagttccctctcggtttattaagcgatcgattcgggagaaaacgtgtcctgctcgtcatcttattaacgggtgccctttgctttttgacggccggactgtttccgtcgccttctgtcatcggctgctgctttttcacggcggggatggcggtcggcagtatgttttccctcggcatcagctatatgagcgacctgctgccgtcccatctgctgccggcgggcaacctgctctgcggcatttccttcagcctcggaagcatgatcggcccggtggcgggcggctggtatatgcagcggtttgaaagcgccaacttgttttactttattacggtgattctggtctgtatttggcttgcgctcgtcttcgggaaaacaaagcacagccccgcttccgaatcccattcttttccggccacataaaaaagccgcctgatctgagccaggcggcttctttctagtggtatccgttctgcccgttggcgcttccgcttgttttattcttcgggccgttttttgagttttgtttattatggcttccgccttttttcgtatgcttggtcatagccgattccctccgtttttcagcttgaacgtcatccgttcctctatagcttgctcccgcggtacggattttcatcaggaagctttttacgtttatgtaaaagcgcgttgatttctcctcctaaaatcaacaaggttcccgtaaggtaaaaccagatcatcaggacgataattcccccgatgctcccgtatgtggcgctgtagttggcaaaggtgccgacgtaaaatgagaacagcatactgacgataatccagccggctgccgcgaatacagctcccggcaggacaaaacggagggaaagctttttattcggcgcgaatatgtaaagcgcggtaaacacgattaaaaggataagcggactgataccccagcggacaaccgaccacacctgcaaaaacaggtccgaggcgccgatgaaatccgcggccagcattccgatttctctgccgaacaccggcagaagcagtgcgattaaaatcgtaaccaccatcgcaatggttaaaaaaattgaggtcaggcgaatgatgataaatgagcggttttcctcgacttcgtaggcatggttaaatgctctgacaatcgcgttcataccattcgaagccgaccagatgacggcgataatcccgaatgacaaaagcccgccgctgcgcttgttcagcgtttgctccgttatggatttcaccatggacatggcgctgtcgggcgcgtattgatcgaccgccccgagcacgtcttctgccgatatgggaagataggcggtgagcgtcagcatgaaaatcattaacggaaacaatgacagcaggaaaaaatacgccagctccgccgatttactttgtccttcatgcagagaaaaccttgcaaacagctcctttataaaactcatgacatcccacctcaatgatcgtttttcgaaaaatgctccttcgtttcttttaacaggtcaatgacctgcggtgtcgtctgcttcagcttggtgatctgcccgtttaaaaaactcagatcttccgatacggtattggcgaagattttcacttgatccatttttgcggaagcctgctgcttcagggcttcaggatgttttcggtaaaatgccgcacgccgcctgcacgcgtccatgttccggaaacatgcctctctcgtcggcttatgtaataaggacagtgctccgccggcggcagcgccgatcagaatggcttttgccatgatgcgtgtctgcttcatcggtcaatcccccttataaatgatggtctttctttattgtctccagcaaatgacggcacccggactcgaccaaagcgtacacctcgctgaaatttccggtataatacggatcgggcacgtcggcaaggtctgactccggtacataatcaagcagccttgcaatacgcggcgccgcttttttataaccggccatgctgcgcagatgtccgatattttctgcatccatcgcaatgacgtaatcaaaatcggtcagatcagactcacccgacctgcctcgccgtgatgccgcttgcgctgatccctttctccttcaggatctcctttgtcccttcatgcggcggatttcccgcatgccaggcgccgattcccgctgaatcaatgttaatctgcccgttcagcccgtttttcttcaccatatcagaaaataccgcctctgccataggcgaccggcaaatatttcccagacagacaaacagcacatgtatcatatcgataacctccctattctttccccgcattttgaggatcaaaaaccttatcaacatcttagcaatttttctgcggctgtggaaataagcttttattctaaatgaattctgttagaataaaggggacgaaaacgatcatgaaaggatgcatgaatttgccgagccaacaaacagaaacgttaaataaaatgattgaagacatttcgcaaaagctcaacatgctcaatgtcggcgtcatcagagcggaagatttcagtgatgaaaaaatagaagatcttacataccttcatcaaatggtcatgaaaaaagcatcattcagcccgagtgaaatgcaggccattgccgaggagctcgcctctctcaggaaataaacccatgtcagacctgccgaaaaacggcgggtcttttttgatttaaaaaagtaaaaaataaaagttcatcggtttgacacatataaaaagaaggagtatagtaactgtgaacttggtagaacgatatactaaatgagcgggccgcttatctttttttgtttagtagaacgatatactcattgtgatatcagcgttattcaagtttgtctatgcaaccgttgtatcaaacagttttcaaagaaaggcagtggttcaataaaggggtatggtgctgtgcttttatcaattaaaaaaataatttaattctttattaaccgcattaggggatgtcatcatgaaaaacatatacaccaaaatggcagcgggtctttatattaactatttcctgctgggcatgatcaatattattatcgcatccaatatggaggcattatcaaaacagcttcatacttccgcagccggtgtcagctatttggtctccgccatcgggatcgggaagctgatttcgcttctgtttgccgggaagctttcggatacattcgggagacggccgtttatcgtgtcgggcgcctttctgtatctgattttcctaatcgggattccgctttcgacaaactatacggccgcgtttatcttcgccattttcgccgggatcgccaattcctttttggattccgggacatatccggcgcttattgaaggatttccgaaaaacgcaagctctgcaaccgtgttaatcaaagcgtttgtatcaatcggcgcgacggtgcttccgttttttatcgcgtttattgcggacaggcatttgttttacggctggacgtttttcgtaccgggcattattttcttcctgaacggcttttttctgttgaaagttccgtttccgaatcataagcaaaaagaagacggcggccggacggaagcctctccgtctgatgacgcgttcacatcacagccgtcgatatggcgcgaaggcgttgcgatcattctgttaggcttttcatcaacggcgctgtttatgctcgttcaagtatggcttcctaagttcgggcaatccgttttgggcatgcctgaggtgcaggccgtcaaattgttgagctattacagcatcggggcgcttgtgtccgtgttattgctggctgtgctgttaaacagagtgattcagccgattacggtaatggtgctgtaccctgtgatcgcggcaatcgcgctgcttgctctgattttcattcagcagccggccgtatcggtcatcagctcctttgtcatcggactttcaactgcgggcattctgcaattggcgatgacggttatggctgttttattccctaaaaataaaggtacaatcacatcttttgttaatatagcatcaagcttatcttttattgtcattccgcttgtaacgggagcgatatccaaagccgccggcctgacgcctgtttttctgcttgatatcggaattgcggccgtcagcgccctcctcgcattgtttatcggaatccgctttaagcaagtgatgaaagcctgactattttttaagggagaggatttatcatgcaatctatcacaatcagaaacacggtcatcggtgaagggcttccgaagatcattgtgccgctgatggcggccggagagaaagaactgctcgaagaaattgaagccgtcaacaggcttcgcccggatatcattgagtggcgggcggatgtatacgagcatgttgacagcctggacgccgtaaaaggcatgcttgaaaagctgcggaaagccgcaggagcaacaccgctgcttttcacattcagaacccataaagaaggcggaaataaagttattgatgaccgcttttacattgaattgcttaaaaccgccatcgaaacaaaacatattgaccttgcagacgttgagctgtttacgggagaagcggaagtcaaatcaattgtgaaaaccgctgaagacaacggcgtatatgtcgtcatgtccaatcatgattttcatcagacaccgaaaaaagaagaaatcatttcccggctccggaacatgcaggcgtacggcgcgcacattccgaaaatcgcggtgatgccgcaaagcactgaagatgttttcgtcttattggatgccactcacacgatgaaaacacaatacgcagaccggccgatcatcacgatgtcaatggcgggaacaggcctgatcagccggctggccggcgaagtcttcggctcagcgtgcacgttcggagcgggcaaagaagcatcagcgcccgggcagattcccgttgaggaattgcgcagcgtactcagcattttaaataaacatatgtaatcagcgttttttgccctcaaagcgggaggaaaaacaaatgaatggactaacggaggaatacatcatgaagaaagaattaggacggattaacggaaaaactcagcttatcggattattcgcgacaccgatcggacactctttatctccggcgatgcacaacctggcgtttaaaaaattaggattgaactacgcttacctcgcgtttgaagtcggcaatgaacagctggaagatgtggtaacgggaatgcgcgccttaaacgtcagaggcttcaatgtctcgatgccgaacaagatgaacattctcccttatctcgatgaactcgcggattcagcgaaatttaccggcgcggtaaatacagtcgttaatgaaaacggcagactgatcggacactccactgacggtatgggatacgtccgcaacttaaaagaacacggcatcgatatcacagggaaaaaaatgacgctggtcggttccggcggggccgccactccgatagcgattcaatccgcattggaaggcctcggagaaatctctattttcgcccgcaatgacgcgtttttcgaaaaagcggaagaaaatgtccgcatcatcaatgaagaaatgaagggatcttcttgtaaagcgaaagtcttcccgctcgaagatcaagatgcgctgcgtgctgaaatcgcttcaagcgatattttcacaaacggaacaggtgtcggcatgaaaccgcttgaaggcttgagtgttattgaagatacatccatgctccgtccggatttgattgtgacagacgtcgtttacaaccccgttacgtcgaaattgcttgaacaagctcaagcagccggctgcaagaccattaacggtctcggcatgatgctttggcagggcgccatggcgtttgaatattggacaggccgtgaaatgccggttcagtatattaaagagcaaatgtttgaataacctattgtgacagaagcgccgaaggacaatccgtcttccggcgctttatctttttccccctcctctctctttcttctcatgcgccaaaacgcttataatggatgtaacgaataaaaaccaagtgaggaatgcgacgtatgaaacagcaaaaaaaacgccgggtgacattgcagcaggtcgccgaacatgccggcgtctcaacatccaccgcttcattaattgtccgcaataatccccgaatttccgaagcgacccgtgagaaagtgctgcaatccatgcgggagctggggtacgtatatgatcgggtcgccgcgaatttacgatcacagacgtccacaacggtaggattgattatcactgacatttccaatacgtttttctcagagtttctgatcggcgttcagaatacgcttgaggaagtcggattaacggtgctgttaggcacgacatttgattccgtcgccaagcaggagcagctgatctcgaccatgctggagcacagggtcggcggattgattttgtgtccggtttcagggacggctgaggaaaccctttcccgccttgagcagcttgacattccggtcgtgctcgccgtcagggagattgccgatgccaactgtgattttgtcggagccgattatgaggaaggcacctataaggcagtgcgtcatttcattgagaaaggccatcaggagattgcgtttctgggcggcgtgaagcactcatcaacatggacgaagcgtatgaaagggtttaaaaaagcactccgtgaagcggatctggaagtgaaaaatgaatatgtcattgacagcgcgccgacccgcgaagcaggctgtgacgccgtgacggagctcctccgccggtctgagcgcccgaccgcgattttctgcttcagtgatttggtcgcattcggcgtcatgcaagggatcagaaaagccgggctcgttccgggcgaagatattgacattgtcggctttgataacgtgccggaagctgaaatttcttatcctccgcttacaaccgtttcttcctttccgcggcagtcgggaaaagaagcggctcaattgctgcatcataaaatcaccaattcccagcacaaaaaacaacgcattattctggcgcctgagctggtcatccgggaatcttcacaaaaaaagcggaacgcctgatacggcgctccgcttttatattacgcaagcagttttaatgattcgcggttgaatgccggaatgtcatccggtgtgcggcttgtgaccagctggttctggcagacgacgacttcttcatccaccacattcgcgcccgcgttttccatatcgattcggattgaagtaaatcctgtcgctttgcgcccgtccaatgctttcgcgttgatgagaagctgagggccgtggcagatagcgaacaccggttttttatcatccataaacgctttggcaaattggacgaaacggtcatccgcacgcagcatgtcaggtgagaatccgcccgggatcagcaatgcgtcaaagtctttcggattcacatcatcgatggacgcgtccactttcacttccgcttccccttgttttcctttgactgtttttcctttttcctgttcaattacggttaattcatgacccgcatctttaaaagctttcgcaggttcagtatactcgacatcctcaaagtaatccgttaatacaactgcaatttttttacccatagttactacctcctgcttgatgaagtctacataaatccatgtaccccagccacactaacatcaaacataggtaacgcgtttaccgcccgcctgttttacataggtcattatcctcattttttatcttttcacaagaatcatcatgaaatctatataaactttcacaaaatattcttacaatggtactgcatgacaaaatttgttgaaaggtggagaacaggtgagaatacagaaaagacgatgcagcgtcaatatgacactccgtattctgctgcccctagttatgatacttagtctgatcctcccaacatcacccattaaagcagaagaaaacaaatcctccagtgtgaatctcagcattttagccacaactgacgttcacgctaacatgatggactacgattactacagcgacaaaccgacaacggaattcgggctggcccgaacggctcagcttattgagaagcacaggcgcgaaaacccgaatacggtgcttgtcgataacggagacctgattcaggggaatcccctcggagaatacgccgtaaaatatgagaaaaatgatatcatttcaggcgcaaaaacccatccgatcattgaagtgatgaacagtctgcattatgacgcaggaacactcggcaatcatgaatttaattacgggcttgaattcctggacgggacaatcaaaggcgctgattatccgatcgttaacgccaatgtgaaaacagtaagcggcgaaaaccgttatacgccttatgtcataaaagacaaaaccgtcacggatgaaaacggcggcaagcatcagctaaaagtcggctatatcggctttgttcctccccagatcatgacgtgggataagaaaaatctcgaaggccgcgttcaggtcgaggacattgtggaatccgcaaagaaaaccgttccgaaaatgaaagctgaaggagccgatatcgtcatcgccctcgcccacagcggcatcgaaaaaaaagcgcagtcttccggagcggaaaacgccgtttttgacctggcaacgaaagtcggcggaattgacgcgatcgtatcgggccatcagcacgggcttttccctgatgccgaatacaaaggcgctgctcaattcgacgtcgataaaggcacgattaacggcatccccgttgttatgtcaagcagctggggcaaatatgcgggcgtcatcgacctccggcttgaaaaaacagacagcgcgtggcatgtggaagatgcaaaaggcagcatcgagccgattgccggcaatgtgaattcggaaaacgaaaccgtcgtcaataccgtcaaaaaagcgcacgaaggcactttgaaatacatcagagaacccgtcggccagacaaaagccgatatcaacagtttcttcgcccaagtcaaagatgatccgtccattcaaatcgtaacggatgcgcaaaaatggtacgccgaaaataagatgaaggatacggagtacaaagatctgcctatcctctcggcgggcgccccgtttaaagccggcgggcggaacggctcaaactactatacaaacatttccgctggcgacctcgccatcaaaaacatcggcgatttgtacctgtatgacaacacggttcagatcgtcaagctgaacggaagcgaagtgaaagactggctcgaaatgtccgcggggcaatttaatcagatcgatcaggcaaaaggcggcagccaagcgcttttaaatgacgcctaccgctcatacaattttgatgtcattgacggtgtcacctatcaggtcgatgtcacaaaaccggcgaaatacaacgaaaacggaacagtcattcatcccgatgcaagccggatcgtcaacctttcttatcaaggaaagcccgtcagcgccaagcaggaatttctgatcgtcacaaataattaccgcgcttcaggcggcggaggattccctcacttaagcaatgacaaaatcgtatactcttctgccgatgagaacaggcaggtcttaatggattacatcatccagcagaaaacgattaatccgcaggctgatcataactggtccatccttccggtcaaagggacaaatctgacatttgaatcttccttggccgcaaagccgtttgccgaccgcgcagatgacgtcgcctatatcggtgaatcacaaaacgcgggctacggacagtacaagctccaattcaaagatgatgaaccgggcacagatccgccgaaagatgacgcatggaaactcaccgttatgcatacaaatgacacgcacgcccaccttgataacgcggcgaggcggatgacgaaaatcaaagaaatcagaagcgaaaccgaccgcagcattttgctggatgcgggagacgttttctcaggcgatctctatttcacaaagtggcaggggctggctgatttaaaattgatgaacagcatgggctacgacgcaatgaccttcggaaatcatgagtttgataaaggtccgggtgctctcgccagcttcttgagcggtaacgggagcgcgtctgacccgtccgggaaatacaattttcaagcacctgactttccgctcgtcagctcaaatgtcgatgtgtccaaagagtcaaaactcagaccattcatgaaaaaagcagacacatttacggcagggaaaaagaaaaaagcaggcatctatccatatattctgcttgatgtaaacggagaaaaagtcgccgtattcggcttgacgacagaagatacgtccgtcacatcaagcccgggaaaaagcattgtctttcatgatgccttccaatccgcacaagatacggtaaaagaaatacagaacaaggaacatgtcaataaaattatcgccctgacccatatcggacatcagcgtgatctcgatctcgccaaaaaagtaaaaggcatcgacttaatcgtcggcggacatacgcatacgcttgtagataaaatggaaattgtcaaaaacgaagagccgaccatcgtcgcccaggcaaaagaatacggcgaatatttaggccgtgtcgatgtcgcatttgacaaaaacggcgtcgtcctgccggaacaatcctctcttcaagcgctgccggtgaatgagcagacgaaagaagacccggatctgaaaaaagagcttgatccgtttaaaaaagagctcgtctcagttaaaaatgaaaaagtcggttcaacgaaggtcgcacttgacggccggcgcgagcatgtccgctccaaagaaaccaatctcggaaacttcatcgcggacggcatgctgcaaaaagcgaaggaagcggccggcgcccaaatcgcgatcacaaacgggggcggcatccgcgcgggcattgataaaggagacatcacactcggcgacgtgctgaatgtaatgccgttcggcaacacgctttacgtcgcggatttaaccggaaaacagatcaaacaagccctggaacaaggattaagcggaattgaggctcaaggcggcgccttccctcaagttgccggtttaacatacacgtttacactgaataaaaagccgggacaccgtgttcttcaagcttcggccgtacaggatgacggcagtgtaaagccgatttctgataagaagacatacagagtcgccaccagtaactttgtcggtgaaggcggagacggatattccgtctttaacgaagcatcccataaagaagaccttggctttgccgactatgaggtcttcgttgagcagcttgaaaaagcgggaaaagcggtggaaccgaaagttgacggccgcgcgcaggaagtgtacctgccgacaaaacaaaaaaacggttcgtggacgcttgaagatgacagcgcatttgccgtctatgccaaaaacgccaacacgccgatcgtgtattacgataagaatgacggcgccaaaaagccgattgatctcagcgtgaccaaaaaacaaatcggcctgttaaaggacagaacatcggattcttcccttacgatcctgcatgacaagttcagcatgaaaatgccgatggcaaacgccgcttcagctgatacacgattcggcgtggcgccgaaaggaaaagttagcggggcgctttcaaatgtatacgactttacaatgaagcagaaaaacaaagacatcaaaacattcaaagcgccggtaaagctcaccctgcgcattgagaatatgaaaaaggcgaaacagcccggcatttatcatgtagaccggaaaaagaacgtctatacaaaaacagacaacggttcggtttcacacgatctcgtcacgggctatacaaatcatttcagtgaatacaccatattaaacgcaaacacgaagagcgcgccgccgacaagcggagatcacggctccggaaagcagccaagcggacaaaaaccgtcatccggccctgcgcaggacggagtatcgccgggcggcctgcttcctgatacagccacaacgatgtattccatccttcttgccgggttactcatcagcgcgctcggaacggcactgtatctgtaccaaagaagaaaagcaaaaaaagtgaacgaagcataaaaagaccgcttttatcgggcggttcatcccaagagctctcctgatctgatatcaggagagctttttctgccggtcccctctgagtcgacagccgtacggccgagtgataaaatatgaacgttattcgcgaaagactgcatccgcatcgtttaacacttcacggcggagcctctcttttacacggcgccgcctgtttggaggactttttttgaagattacaggaaacaaacgaaaccgcatgtcttacaagaaaaagctgttttacgtgataacagcgctttgttttatcagctcgatcatttttgtcactcacaacgcttctttttatgagcggccgattgccagagtgacgaaaacaactttggaacaccaggcaaacgtacaggacatgcataaaaacaaagataagattttcaatcagacgatcactgccagacttgaaaacggcagtcagaaagggcagctcattcatttgtccaatcagtattctttatccggagcgaatgatcagaaatattcgattggcgatgaagtattcgtttctattgataaagggaaaccatcaaacaaagatatatcgggaagcattatagataaaaaacgggataaacagcttttgctgatcgcttgggttttcatcttcaccttgcttatcgtcggaaaaaaacaaggcttcttttcgatcgtcagcctgatgtttaacgccgttttactgtcgtttgcattagatttgtacaggaagcatcctaatatagggttaatttttatctgcggtatctgtattctcatctttacggtcatctcattgctgcttgtcagcggttttcacgcgaaaacatatgccgccatagccgcgacgctcgcaggcactttcgtttccctgctgattacgtatctggtgatgctggcaaccggagagaaaggtctcagatatgaggaaatgcagtatttaacccgcccttatcacacggtgtttatggccggggtatttatcggatcactgggagcggtcatggatgtagccattaccatgacgtcatctgtcttcggattatatgaagaaaacaagggtatctcattacaagctctcagacgttccgggatggagatcggaaaagacatcatgggagcgatgaccaatattctgttttttgcttatataagcggctctattccgatgatgcttttgtatttgaaaaatgattccccgataggattcactctttctatgaacatttccttggaaatagccagagcattggccggggggatcggaattgtattaaccatacccgccagtctgtatgcttctgtcttttttattaaacaaaagaaggcaagctcatgaatgtcatcgtaattctcgcggcgattttatttctattaatggtcattatcggcggaaaaaaaggagcgaggtcttttattgcgttattcttaaatttcggggttctctttctcaccattattttcatgacagatccgcatatcaatccgattgttttaacattgctctcttccgccgtgatttgcagcattactcttttttatattaatggaggaaacgtcaaaaccgtaaccgcctttatttctgcgatgctgaccattgcattgctgctgttttttattatgtccgtaacaaaacatacttcgattcagggattcggtgaagaagaattgggggatatcggcatattcacactgtttgtcggggtggattttgtgaaggttaccgcagctatgatcatcatgggcacgattggggcgattactgatgtcgcgatttccattacttcacccatgcgggaaatttacagtcataatccgtccatgagcagaaaagaactgtacacattcggattaagcatcgggagagatattttaggaacgaatacgaatacgttattctttgcttttttcggcagctatttggctttaattatctggtttaaagacttatcatactcagctgaaaaaatagtgaactcaaaagtattcagtgcggaagccgtcaccattctttgcgccggaatcgggatcggcatcatcattcccgttacgtcctggatcaccgcctgttttttagcaaaaccaaataaacattaaaagctgccgggacacgcccggcagctttttttatcttatacccactttacaacgtcttttgaggcagatcttgttttcgggcgcggttctctgacacggtagccgaatgcggccatgacagagatgtcgaaacttccgttttccagaagcccttcttcttcaagaatccggtggatctctttgtagttgaagccttcaacagggcaggaatcgatgccgatctgcgcagcggctgtcatcatattgccgagggcgatgtaagtctgtttggatgcccagtcaaacagcgcgcgatctgattcaagcagattgaaatcatttttctggaagtcttccgttttgctgatatagccttcatacatatcttccggcatttttttgacttcccgcaagtggtttttgacatagtcggcgtcaaaacggatatcctttgccgtccgggcaagcagaagtacgaaatggcttgcggtcggcagctgcttttgcgccccccatgtgaactcgcggagtttttcacgaagctccggattttgaacgacgacaaatttccaaggctccaaaccgagtgagcttggggataatcttcccgtttctaaaatgaattcaaaatcgctttctgaaatttttttctcaggatcaaattcctttgtagcgtgtctgaattgatacgcttcgatgatctgctgttttttatctgacattcatgatctctcctttttatctcgttatgtactattgtagccattatttttgaaagtaccagtacgcacatttttgttggatagtattcattttgatactgacaaaaaaacgggctgccgcggcagtccgtttttatttttctcttctcgcaaagtcgacgaaacggaatttatcgagcctgtgccggctttccgtgtactgaaagaggctggtatcctccaaaaagacgcggtttttcacgaccgccatatggctgaacccgccgagatccaaatacttccggtcttcctcccccgccggctccacgacaatttccttttgcgcgtagctgatggacaggccgagctctccttcgagatactcatagatcgaatcttcacaaatcgccttcgttaatagaggcacatgttttttcacaaagtaatccttgtccaaaataatatgttctccgtcaatccgtcttgatctgacgacttcccacaccttttcatccgccactgtaccaagctcttttgcggcttctgagggaggcaggatcagcccgagacggtgaacctccgttcgcgtctcttttccgagcgtttccgaaagctctttgaagctgatcaggcctgagacgggaaagcgcattttttctctgtctaatatgacggagcctttgcctttgattttctggatgtagccgttttgcgccagcatattgagcgctttacggacggtttctcgtgatgtgccgtattgatcgcataaatcattttcagacggaagaacgtcttcagccttccgctggccgctttcaatctgccgcaccatatctttatagattgtgatatatttattcactttcattcatgaccacccagattagtgtatcacgcttttgtcagatgataaacgatcgattcatacggacggagcgtcaatcgttccggccgcccttccctcggttcatcattcgtcagcagcaccgtaaaccgccagccgtccgtgtctttaagcggaaccgtaaagtccgcttctttcccgtagaagttgttgatgcacagaagtttttcatccttgccgtgtctgacgtacgccagaaccgccggatcatcttcagcaagcagctcaaacgttccttcagtcacgatgtcatattcctttctgagcttgatgagcttctgataatggtagaaaattgaatccgggtcccgcaaagccgcttccgcgttaatgtcccgataatcatccgccgccggaatccaaggcgttcccgtcgtgaagccgccgttcggcccgctgttccattgaacgggggttcttgcattgtctcttgatttctcttttaaaatggcgataatgtctttttctgacacgccttcttccttcatctttttgtaaatgttcagtgattcgacatcgcggtatgagccgatgtcatcgaacttcggattgcccatgccgatctcctcaccttgataaatgtaaggcgtgccctgcatcatatgaatggccgccgccagcattttggctgatttcgtccggtatacgccatcgtctccgtatctggatacggcccgcggctggtcatggttgcaccagaataatgcgttccagcctccgccgttttgcatctccgtctgccaaaacgctaaaatccgtttcagcttcagaaaatcaaacggagcgagcgcccatttttcaccattcggataatccacttttaaatgatgaaagttaaaggtcatatcgagttctttattttcagggtttgtgtaccggatgcagtggtcagccgttgtcgaggacatttcaccgaccgtcatgctgtcatatttcgaaaacacttcccggttcatctcatgaagaaattcgtgcacgcgcggcccgtccgtataataagggcgcccgtcacgaccatcctcggcatcaggaaacgattggtctttagaaatgaggttgatcacatccagccggaagccgtcgatcccttttcggaaccaaaaatgcatcatgtcgtaaacctgttttctcatctcttcattttcccagttcaaatcggcctgcgacacatcgaataaatgcagatagtgctggcctgaggccggatcgagctcccaagcggaaccgccgaattttgattcccagttgttcggcgcccggccgtcttccttgccgtctttccaaatgtaaaaatcccgatacggactgtcgggtgacgaaaccgcttctttgaaccactgatgctcgactgatgtatggtttacgacaagatccatgacgacctttattcctcttttgtgcgcttcatcgagaaggcgttcaaaatcctccatcgttccgtattcttcataaatggtgcagtaatcgcgaatgtcataaccgttgtcattctgcggcgaatcgtaaatcggcgtaagccaaatgacatcaatcaaaagcttctgcaaataatcaagcttctcgataataccgttcagatcaccgatcccgtttcccgtcgtatcattaaagctcttcggataaatttgatataccgctgcctttttccaccatggtgtgctgtctgttttcatttttcttcaccgcctgtattgttttgaatggaaagggaaaagggacagcctgttagaaggcgccccgcaggttttctatttttgccgtttcagccgcgcatacccgtatgttcccgcaaacgggagtatcagcacgatcagcattccgatcgcaaacggaccccagtaccggctcataatggagaagatccccgggacgccgccgactccgaccgagcttgcgagaacgcctttgacggagatgaacatccccgcaatccccgagctgatcatggcgatcacaaacggaaatttgtaacgcagattcacgccgaaaatcgccggctcggtaatgcccaaatatgcggaaatgccggccgtcagtgaaagcccccgctgttttttatcttttgtaatgagcatcatggccagagccgccgatccttgagcgatatttgataatgcgagcatcggccataaaaatgtgccgccgagctttgatccgattaattgaagatcgaccgcgagaaacgtatgatgcatccccgtgatgacaagcgccgaatacagccctccgtacagcaggcctccgatggcggagaattggccgaaaacggcaatcaatcccgccgtcagcgcgttaccgatcgcaaaggtgatcggaccgatgataacaaaggatagaaaaccgatgaccaaaagcgtcaccggcgcgacgaccaacagctgaatgccctccggcgtccgtttcgtcaaaaagagctcaagcctggcaagtaaataagacgccagcagaatcgggagcacctgaccttgatacccgactttctgcacctcaaggccgaacaagttccacaccggaatatcgccgctctgctcggcggccccgtatccccatgcgtttaacagatcaggatgcaccagcatcagcccgagcacgatgcccaaaagcgggcttcctccgaaccgcttcactgccgaccagccgattaaagccggcagaaaagcgaaggccgtccccgcgatcagattaatcatattggcaagatccgcccattgcggatacacttgaacaatcgatttcgtgctgtaaaaaatgccttccgccgttaagatattgttcagacccattaaaagcccggccgtgacgatcgccggcaagatcggaataaagatgtccgcaagcgttttcatagcacgctgtaaaggattcattttttgcgatgccgccttcttcacgtcatccttggacgcttccccgatccccgtttccttcactaattccgcatatactttgttgaccgtcccctgcccgatcacgacttgaaactgcccgtttaccgcaaaagatcctttgacaatgtctattgcatcaagcattttttggtttaccttggtttcatctattaatgcaaaccgcaaacgcgtcacacaatgagtcgccgcctcaatattttcgattccgccgacagcttcagcgatctgccgcgcagcccggttaaactcacccatgccaacccctccgtaaccgttttcattttgtctcaaaaaacttgtatatacatgtttatgactctattgtaatgatgtatatacatgtcgtcaatctatttttatagcgctttcatcacaaatatactgcgaaagaccctgaaacaaaaaaagccccgccggaaccgggccttgacttcttgtttggtcgggaacatgtccgggcggaattcacaacaggagcacaaaaagcatacagtactgtacaactaagttaaagaggtgtgaagagatgccatccactgttatcaacctgtactatttgaagattaacagtatttctggcaacggatctattacgattggggaagcggcatacaacagtcccaccacaaataacaaatcacaaggactgaactcttcattcggcgatacgtcacctatagaatcgatgatggagaacttgttaaatgatcctgatgtcaacgaccagacagccatcggaaccgcagataccgcaaatattacgccggtgccgcccattatagattaaaggggtttttatgaatgccttaccaaattaacgtcgtcaatataaaagtaaacggagcaacgcaaaacggaaacgtcgatatcggtcagaccgtacaaaacagccacaccgccaacagcaaatttgtcggcgcgaacttttctttaggggatttttcgccggccgccggatgtttgaattcgggccatcttgaccctgacgtgagcgatcaggatcagatcgccaacccgtcaatgccgatcgcaaatcaaatatagggaggttctgccgaagtggatatcgaaaaaatgagaaagtggcttgagattacgaacgagcacaagcccagcgacttttggaccaatgtcctgaaacggaaatctcccgaagattttttctccttacaaaaaaacaccctgacttatgatatttatcaggatgaacagcacacatttgtcattgtggaaatgcccggcgtttacgaagaagaattgacattgaggctgctgtcaagaacacggctgcatataagaggaaacatcacacccctttttccgaagaacatgggcgtctgccaaaaccggtattacggggaaatcgatgagacgattgagcttcctgaaccggctgagccccacctgttacaggcgcagtgcgtaaacggcctgctccacatttcctacccgcgccttatggagcacattccttttcagaaaaaaatataaagagccggcttacgggcggcccagccgtctgtacactttctccttataatgagaagatgcgggttttgagaacatggctttctcctccgtcagtttgtcgagtctgacttgtttttccgtccgtttgttccgcaggtgatcccgctcctgttcattgcggcacttggcgatcaaataatcgagcgtcatcagctctttcttcagcgcgccctcatcctcggcgatcccggcgttttttaatatgcggtagcccattctgagcgactccggaagatgtgcggcatcgtctttcggcaggggctttcccattccattgatgccggcgaactctccatccttaatggcgcgcttgattttatcttcagccacgatatgcgcaatatccatcactgtttacctctttcttcaatagaatcgggtgtgatcatacggaaattcacatcccagtttgtgccatttgtgttttttaaagctgtcattcaacagatcaaccgccgctgcgacagcgtttttcgccctttttccgatgagccttttccaccttttctatttgctggtttcatggtatattgattacgttcgttttttctatcgttccgtgtaaaccgtgatcggaaaaaaggagtgtaacaatgaaaacatttataaaagaaagaggacttgccttcttcttgatagcggtcgtgttattgtgggtgaaaacatatgtcgcttatattttaaactttaacctcggcatagacaacacgatccagaaaatattgctttttgtgaatccgctgagctccagcttgttctttcttggatttgggcttcttttcaagaagaaattacagcagacagccattattgtgattcattttttattgtcttttttgctttttgcaaacatcgtctattatagattctttaatgatttcattaccatcccggtcatgatgcaggcaaagacaaacggcggccagctcggagacagcgcgttctcgttaatgagatggacagacgccttctacttcctggataccgtcattttgattattttggcccttaagatgaaaaaaccggctgaaaaaccggcgaagaaatcattcagaatcgttttggcttccgccgtgcttgtgttcctgatcaacctcgccgtcgcggaatccgaccgtcccgagcttttgacacgctcatttgaccgaaactatctggtgaaatacttgggcacgtacaactttacgatttacgatgccgtgcagaatgtgaaatcaaacagccagcgcgcgcttgccgattcaagcgatgtaacggatgtggaaaactatatgaaggccaactatgacgtgccgaataacgtctacttcggaaaagccgaaggaaaaaacgtcatctacgtctcattagagtctctgcagtcctttatcattgattacaaaattaacggcaaggaagtgacgccgtttttaaacaaactggcgcacgataatcaaacattctactttgataactttttccaccaaacgggacaaggtaaaacatctgatgcggaatttatgatggagaactctctgtacccgctttcgcaaggttcggttttcgtcaataaagcgcaaaacacgctgcagtccgttcctgcgatcttaaaaggcaaaaagtacacgtctgccgctttccacggaaatacgcagactttctggaaccgtaacgaaatgtacaaatcggaaggcatcgataagtttttcgattccgcttattatgacatgagcgaagaaaatacgaaaaactacggcatgaaagacaaaccgtatttcaaagaatccatgccgctcttaaagagcctgccgcagccgttctatacgaagttcattacgctgtccaaccacttcccgttcggaatggataaagaagacacggacttcccggcgggagactttggcgattcagtcgtcaataattacttccagtccgcgaactatctggatgaatcaattgaacagttctttaatgacctgaaaaaagacggcctgtacgataagtcgattatcgtgatgtacggagaccactacggcatctccgaaaaccataataaagcgatggcgaaagtgctcggcaaagatgagatcactgaatacgacaatgcccagcttcagcgggtgccgctctttatccacgctcccggcgtgaaaggcggccgcaatcataaatttgccggtgaagtcgatgtcgcgccgaccgttcttcatctgctcggcgtcgatacgaaagattatctcatgtcaggttctgatatcttatcgaaagagcacagagaagtcattccgttccgtaacggagacttcatctcgccgaactatacgaaagtgtccggcaagtattacgatacgaaaaccggaagacttttagatgattcagaagtcgacaaaaaagaagactctctcgtcaagactgagcttgaaatgtctgataagatcatcaacggcgatctgcttcgtttctatcagccgaaaggcttcaagaaagtggatccgtcacaattcgattatacgaagcgtgaagattcctcagcagacgatcaaaaagaataaacaaaagccagatcattgatatgatctggcttttttatgttcagctcccggcggcggccatagtgcgcttttgcaggctgtcggaaagaactgaataagcgattactttctttttctgctgcttgacgacatctacatgatcttcgtagctgtatacaaacaccgtcacatctttttttccttttctcgtcttaatgacaagcggatcggctccgttttgcggatgaagataacgctcttcatcccctgggtatatataatgccgttcgataaacacggcttcgttaaaatcatcaatcacccgtcgtttgtcttcgccttccagacgttttcccccgagggaaacggcagcggactcgtcactgagctttgaatgggtttcaaacttgcggaggatccattccaccgctccggtaggaaggcatgtcagcacaatcttaatcaggcttatgacaacaattgaaacaactgcaatccatgtcaccttacatcatctccatacttgttctacatgaatcttaacatagaaggaaacattgttttttgtacattatgtgaaacttgatatatgttcaaaaaaaatccggatcacataggtgatccggatttttcaagtctgcttctgatcgtcaaggcggacggcctctctcagctcttccgcgacaaattcgacgttcggcccgataatgacctgcgccgttttattccccgttttgataaccccttttgctcccgcttttttaagcgccgcctcattaatgagagacgtatcctgcacggtcagcctgaggcgggtcgcacagtgatcaatcgtttcgagattttgcctgccgccgagccccttgagcatggcatgttcttcgacggaaccggccgtatcttcactaagcacttcttcctcttcctcatcatcttcccgtcccggcgttttcaagtttaacgttttgatgagcatataaaagacggcaaaatagatcaccgcataacaaagcccgacaacgagcagcaaaagcggtttttcggcaatgccgtagctgaggagataatcgatcgcccccgccgagaatgaaaaacctgacctgattccgagaacattcacgataaataaagagaacccggttaatatagcatgaaccccgtacaaaagcggtgataaaaacataaatgcaaattcaatcggctctgtaattccggtaataaatgccgtcagcgcgagaccgatcatcattccggccgtcgctttgcgcttacttggcttagccgcggcaatcattgccagacaagcggccggaagcccgaacatcataatcgggaagaatcccgtcatataagtccccgccgtcggatccttcgcaaagaagcgggccagatctcccgtttttccgtgaaaatcgccaaactggaaccaaaaaatattattcaacacatgatgaagaccgaatggaatcaaaagccgattaaaaatcccgtaaatccccgcgccgatcccgccaagcccgatcatccattccccgaaggacgtaatcaccgactgaatcggcggccacacaaatccgaagatacccgccaaaataatggtaatcagcgccgttacaatcggaacgagcctgcgcccgctgaaaaacccgagatattcgggcagcttcgtatccttaaagcgattatacgtgtatcccgcaattaaccccgcgataatccctccgaaaacggccatattatttgtcgaattgattgattttacagccgcgtccagcatgatataagaaatggctcccgacagagcggcggccccgttgctgtctttcgaaatcccgatcgcgattccgatcgcgaaaatcagcggcagatgatcaaataccgcggtccccgccgcgtaaatgaacggaatatttaataagtcctctctgccgatggccaaaataataccaacggcgggcagaacggcaatcggaagcataaaagactttccgagtttttgcaaaaattgaagcattttacccatcccccttcttttttcttaaatataccacataagttatctagtgatctataccaattttccttcatttattcacataaggcttgttggttttctatttataaaccagttgtggtaagcttgaatcagatgattaaaaatagaaagcgggaatgacaatgattgtaacgaacgatcaagaattagaaggccttaaaaaaatcggcagaatcgtcgcgctggcgcgtgaagaaatgaagaaaaaagccgagcccggcatgagcacgaaagatcttgacctgatcggaaaggcggtgcttgacgagcacggagccgcttccgctccggagaaggaatacgatttcccgggcgtgacatgcatcagcgtaaatgacgaagtcgctcacggcattccgagcgcctctaaaatcttaaaagccggagatcttgtcaatatcgatatttcggcggagttcggcggtttttattccgatacgggcatttcatttgtgctcggagaaggcgatgaacgtctgcaaaagctttgtaactgcgcggcatccgcatttcagaaaggattggatcaggcaaaagccggcaaacgtcaaaaccagatcggcagagccgtctaccatgaagcccgctccaacggatttaccgtcattaaaacgctgacgggccacggaatcggcagaaacctccatgaagcgccgaaccacatcatgaattactacgatccgtttgataacgcgctgtttaaaaacggaaccgtgatcgcgcttgagccgtttatttccacgaaagcggaaacgattgttgaagcgggagacggctggacatataaaacgccggataaaagccttgtcgcccaagtggaacacaccatcgtgattacaaaagacaaaccgattattttaactgcattgtaatgtttcatctccctcccgaacaggtatacaacaactaacccgaaggagggagacgcatgaaaaaagataaagaaaaaatcaaaattgaaaacgaaatacacgccatgcacggcgtaacgaaacagcagattttagaggatttcgaggaatttaaggcgtaccttcatcagaaaatttccgccggaaaaaaactgggtctggatgacagcaaaatcatcaaaagcgccgccatcctcggggactatctcgccaaacacgaggagccccgcaatgcggaagaaaaactcttacaagaactgtgggacatcgcggatgataatgaaaaacagcatttggcccagcttctcgtcaaacttgccggacactgatacagtgcccggcttttttatgctccgttataagagttgtgctacactggacatatgtctgtgaaaggagccatttttcaacatgtggtttattatcttcgggtttattttctttattgaaagcatcattctcaccgtttacggggtgaagaaaaagaaggggatgctgatttatttcggcgtcgttttcggaatcatgacactcggaacggtgctgttaaaattaaccggccattaagcatgaaaagaccgccctttacatatatatgtaagaaagctttacatctctgaatcgaaaggctcagtttttgcattatcccttttcagcgtctttttatagatgttacaatgccaaaagtttggcaaaaactgaagaaacctccccagcgggagaacggagaaaggagttttctgacatgcattatggcagtaaaggctggtatgtagaagagttaaagaaaaaaggaattacccactatgaaggaagaaagcttcaaagcttcaaaaagtacttccttgccaatctgctggaaacaaagaaacaagcataacgtaaatcagccgtgctgtcagtgcagcacggctttttttctatacattagtgagcctgtccctttttttaaggaaggactccctccagctttctgacagcgcttcttcccgcagtatttcttcaatcgctgacagattgtctgaatcacggtatttcacttcgttcgcataccagacggaaatgctttctttgcctctcgacagacgcttgaggacgggacgcggatcgacatatccttcttcaagcaccctgaaataaaagccggtaaatcccgtctgctgtacacggagcaccatatctttgatgccatatttgagcgcgagtttgacgcagggctggcgcggctggcttacttgaacgacggcttcacccagctgaaagatgtcgccgatccacacgtcttgttcggccagtcctttgaccgttacattctctccgaacgcggcggcgggaagttttctcgcgagcgttgtttcccaatatgaataatgctcggcgggatacacgcacaccgctttatcgggacctccgtgatgcttcagatcagcctgcccgtccccgtcaaaatgggttttatacagcatgacgggagaatctgcgggccgcttgatgatgcctgaattgatttgtctgccggcaaattcatgaattgcgggctttccgagattgatagataagacagaatagtcttgcgtcatctcgttcacatcctttgcgaaatatcctacctttcctttatcatagtaagaaaaaggtggtttttccatgcttcagtatcatatgattgcagacggccgggttcagggcgtaggttttcgctacttcgtccagatggaagccgacagacataagatagccggctgggtaaaaaaccgtgatgacggccgggtggaaatccttgccgaaggccctgaagagtcgttaaaacaatttgccgaagcggtcagaaaaggcagccccttctcaaatgtcacaaacgtaaccatcgaagaatcacaccgtctgaaagggtaccgcaccttttccatcagttactgataaggcttgtcctgataaaaataattcggcttcacaatcgtattgtcatatgatttatggaaaatgtgggtggaagccggcgagatcggcggaatcagccaggtccagtcgcccgtcagctttctgcccgcgtcttgttcctgttcttcaaagcgtttaaattgattcgcggccgtatggtgatcgacaatgctgacaccgtgttttttgtatgaatagagcactgccttattcagttccaccagcacctgatctttccacaggtcggtattcaggctggcggaaatccccatgaccgaagcggcttttttgagcatatcataccgcttttcgtcagcaaggttccttgcgccgatttcagttcccatataccatccgttaaaaggcgccgcgttgtacgacagtccgccgatttcaagcctcatatcggcgataatcggaaccccgtaccacctgagatttaaatcggcaaactcttcaatatccggatgggtgatcggcacttctttcacgagcgtctgaggcaggtcataccagaccggctgcccgtcccctttcatccggaaaagcagcggcagaatatcaaattcggtccgcttcccgcgccagccgagtttttcgcagacagccgtcagctcatatgatgccggatcaccgactcttcctttttcagtctcatatcccgcatagcggatgagctggtgattccagatttccacttgtttctccccgttcttctcaggagggaaaatcgtaatcgtcggtttaatttttccgccgttcgtggcgatttcaatatgttcaaataatgcgtcacgcacctcttctttcgtgttcacattgcgccggtcaatgacgttcagcgattgccagaacagacgcccgatacagcggttgctgttgcgccacgccattttcgccccgtgttcaagctcttccgccgtatggacgtaacttcccgtccgatctatctcatcttttatcgcgtgcagtcgcgcgttgatttgcgattccattccgagttcgtgatagcagacatcaataaaatccttcgcctcatcccaaagtatttccgtatgtttcaaaaaactctctccttcaatttacatctgtttcccattgtatcgtttttaggtgtgaacacaatggtttttttgtatcatactggaaactgcgaagaaaaaacacctgtgattttcgcaggtgttttacaaaacggaatgcagtttttcagccagtgtaagcaaatcctcacggtagttttttcccgtcatcggaattccgtgacccgtcaaaagcgcttccggctccagttccgccaatttctgaacggatgcggccgccgtctgcgtatccgctgtaaaataggcgggcggaccgtgaagctcttgcttttgaatgacaacgtccgcaagcgattcctgttcaacagtgatcacggcatcaccggcaagcagcacgcggtctttatcccggaataatgaaatatggccgggtgtgtgaccgggcgtatgcacccatttccattcttcaagaaacggaacggtaccgtctgaaggcagtgcctgaacggacggaatgcggatcgtatggcgcggaaacagcggtgacagctttgcgacaagcccttttttcgcatcgggcctggcaggcggataatccgctttccccgtgacgtacggaagctccttttcatgaatgtaaaccggcacattccaaagctcaagcagttcttcaatcgcaccgacatgatcaaaatgaccgtgtgtcaaaatgaccgccttcagctcatacccctctttgaaccggcgtttcatttcatttgtaatcatctccgacgattgaggcattcccgcgtcaaccagaatgatttcccgcggagctgagggattttcgataaagtaaacattcgcaatctgcacggtcagtccgtaaacgccgtccgccgctttaaaaccggcgccgcttctcactgaaaaaagcggcataaacggatcactcatcatggcacctcctctgatgcctttagtgtgcgacgaaccgggtgttttatgttaaaaaatcgtgattgcgccgatgatgagcgcaaaggccgtcatgacgataacggcaagaaccgcccatttcatcgcaaatttctgatgttcatcaatggtgaccccggcaagcccgactaataaatgcgtcgacggcacgagcgggcttaacatatgaatcggctggccgataatcgaagcgcgggcgatttccaccttatctacaccgtacgccacggcagtctcagataaaatgggcagcacgccgtaaaaataggcgtcattaggcatcagaaacgtaaagataccgctcgttaaggcaacaatcgccggaataaaacctcccatctgttccggaataagcgatacgagggaaatggccatttcatcaaccatcttcgtccccgttaaaattccggtaaacacgcctgcggcaaaaatcatcgaaccgatcgcaagcacattgctcgaatgggctgaaatgcgctccctttgatcattaagtttcggatagttgacaatcagcgcgatacaaaacgcaatgatgaacagcacggttaaattcacttttcctgacactaaaaatcccactaaagaaagcgttaacagtaaattgaaccaccacagtttcggccgcttccattcatcttccgcagccgcagccgtttcatttgtatgggacggctgctttaattcgatcaccccgagccgtttcctttccatccttccgagtacataagcgaccacaatcatacacaccattccgctcgcgatgacaggcagcatcggccccgtcagctctgccggatcaacgccgagcgcactcgccgcacgcggcgccgcgccgccccatggaatcgtgttcatgatacccatgccgaccccggcgattcccgctaaaataatcggacggattccgagcatgatatacaaaggcagcattgcgcttgtcgtaatcatatacgtcgtcgagccgtctccgtccagtgcgacaagcatggtcaaaacggctgttccgactacaattttgagcgggtcgcctttaaccagctttaaaatacgcgacaccatcggatcaaataaaccggtatcaatcataatgccgaaataaagaatcgcaaacataatcatcactgcgatcggcgccacctgttcaataccggagatcatcatctcgccgacccggttaaaagaaaacccggcaatcagcgcaaacacgatcggcgttaatacgagcgccgttaacactgaaagccgttttgtcataatcagcaccataaaaacaagcatcataagaaagcctaagattgctaacacagtatgtcccctcatcatgaatacgcttacattttaaaggcccgatcccctttatccgcctttttgctatcttatgagaattggatattgaagtaaatattttggattttaaagatttttaattttttataaccttttcgttcattttgttcatttataaatcaaaagccttccgcaaatatgcggaaggcttatttttcgctgctcatcatctctttataaaactcggtctgctcttctaaaaagcgttttgcgccgctgctgtttttataaaagctctcccaatcccgttttttcaacatttgcttccactccgcggatgaagtaatctgtttcaaagcctgatcccaataggcgatctcgccttcggtcatgtctttcggccccatgatgcctctccagtgcgcaaagacaaacggcaccccctgctctttccatgtcggcacatcgctgaagccggagagccttttgtcagacgtaacggccgccaatgtgattttccctttccgataggcgtctctcgcttctgaaatggtcattgaggcggcgtctatctcgtgactgataagagcttcaatgacttcattgctgcttccgtattgaaaaaagcggatatcaaacggagaaattccggccatttccgccgctctcgcaaaggagagctggtcatcatttccgaggccgggcgcaaatccgatttttatgccgcccggatttgctttaatatcgccgagcagccgctttccgctttttatctttgaatccttcggaagagcgacggtctgccactcttttgcgataatggccaaaggcgtaaaatcagctgccttcagccggctttgtcccaaaatttcattgcttaacagcagacttgaattcatactgatgacatccgtttttcgttcgtttacatatttccagccgctgtctccgcctcctccgggtttatagatgatctttacgggccggcctaatatttgcttccgctctattaccgattgcaaagcttttgccgttacgtcccagcccccttgaggcgctgccgggacgactatttcaaccggcccttcagctgaacggatgcccgccgcctgccgtccgtcaaaagaaaccagcgccgccagcatgacaagaagcactcccaaccgcttcatttctcccatcccttactcatgtgctaaataatatttccgttccggcctgccgataatgccgtactctaattcagcgagcgcttcttcccgagaaacgagaaactcggcgtagcgccgcgccgttgttctggaggcacccattttttctcccagttcttcagccgtcatccctttttgggccgttctgagcgcgtttttgattttttgaagcgtaatcgaattaatcccggtcggcagatcattgtgctgtttttgttctttctgaccgcttccgaaaaacatgtcaatcacggactggctcagctccggctgtgagtgcagccattctcttttttcacggtactgcaaaagcacttctgtaaatttatgtgccgacaccggttttatgacataatgggcaacgcctgatctgagcgcttcctgcagcagccttgtttcggcagaagccgtaataatgatgatatcaacggaaggaaaacggccgcggataagcgggagcagatctgttcccagctcatccggcatataaatatccaatagcagcagatcaggctgccgtttctcaagcagcgatatggtgtctttggcattgattgctttgccgatgacattgaatccatcaagatgttcgataaatttttcgtgaatttgcgctattcgaaagtcgtcctctgcaatcgcgatgttaatcacaccgattccccctttggcctttctttcggtataaacaccgtaaatacggcaccgccgctcttttgctgcgaaatctcaatcgctccctgcaactcactgacggcttctttcagattggctaagccgtatcctctccttgtcccctttgaagagtagcccttttcaaatatcgtttctgttttttcctgaggcacgccgtctcctgaatccgccacttcgatgacgatatccctgccgatatcggtcataaaaaaggatacctcttttttctctttttcggcgacggcttcgaaagcgttatcaataagatttccgatgatcgtaatgagctgggatgaacccacatgctccggcagcgattctaaaaagctgttttcatctattgaaagcttcactttcttctcagacgcctttcccatttttcctaatagtatggcctgaacccgctgtgaatgaatgttttgaaagaggatttcgtgctgttcattctggatggcgtactcttcttttatcagttcaatggcttcattatattctcccagctctaacagaccgagtatcgcgtaaagcttattcgagaattcatgcgtttgcgcccggagatcctccgagtattttttcatttcagtcagcttgttaatcagtttcttgagctccgttttttcgcggaagctgatcaccgctccgtatacttgtccgttctgcttcatttctttcacgtttaagataaatactttatctccggcacgcacctccacgttcggcggtaattctccccctgccaacaccggcatgagctttgcgcccggcatgatttcttttatatgccttccgatcatcggttccggaagattcagcatatcagccgcagataaattcatcatggttaccgcgccttctttgtttacggcgataatcccttctttcatcgcaaggagcatcgcattgcgttccctgtacagcgctgcaatttcatgcggttcaaggccgagtgtatctttacggatgctttttgcgagcgccgccgctcccccgatgccgataagaaacaccaaacatgcaaaatagcctaaatgccgcaaatgcgccttcatatctttttctatctcatcttgtagaaattcgactgtcaccgttccgacgacttcgttatgatttttttcctccaaaataaccggggcgcttccccggacggccttcattccgtcggaaaccggagacccgccgaacatgacggttttattttgcagattttgattttctttcggaatactgcttcgggccgaatgaaatgcaacatgccctttttgatcagtgatgtagacggcgtgcgcgcctgcctgttctttcatttgttcaatgacgtctaactttgtaaaagcctcttgatccgcaagccggaacgcctcttttacgggaggcatatatgaaatggtttttgccgtttgcaccgccagctgttcagcctgcttctgcccttcctttaattgctgaaaggcaaatataaccgtgagcgttccgatgacaagtattaataaagccgtaattaatccggcgattttcatttgcagagagacataaaaccgcttcgcttccaacacagcaccagccgtcctttcctcctaaaatcataccattttttaaatcttcatttctcatttttgagaattttcgcgatctttttctcttgtcatttctttcaaaaagtgcagtctggtataatttccctcaagagagataagaaggatgaactttttataatcgctgcgcaaaaaaagactgacaggagccagtctcgggatgtttcacaacggacgtatattcagttgacaaagtgtttctctatgatggctgagatacatttgaatgaccggaaatatcaatcaattttcctttgacggccaggcgtccttcggttcttaccgccttgtcgcatgtgattaatgtaatctctttatcttttgtctcctgaattgcgtttgcttctatttctgaaatcatggtttttgatgttacagaataaatatagtcttttctaaagtcggtaatcacgatttgcgcacctttttttatgtgtaaaagagggccgaacaataggttctcctgcttcagatggtggcctgccaacgggtagtttccctcgcccattttctgatccggacgcatagttgccgcgccgatcagcaggttttcattggttgtgccttttaaaatcggaaggtctaaatcgatgctgctgatggttatccgtccgattatcggtttcggtttgcgattaaaacttgactgaactgtttccctgaaaccgggcggatgaatggattcaaattcatagtccgcttttttcatgttatttttccgcgcttgttctgcggtcaattccgattcaatttggcttttactgaggtacgcaatcaaacagcctttcatgagaggagaggaaatgagaagcagcccggacaaaataagaacggcaatgatcatttttttaaccatgaagaaaattcctttcttgtacgtcatgcggtgagtatttggtgagaaatgattctctttttaaaaaagcacctgatcgattcttacatgatcaggtgcgattacgtctatctattccttgctttcttctttcttgatacaacagccgcggctccgccggctaatagcagcagaataccggccgtgaccggcatcataccgtccgtatcaccggttttcggcagatttttgcctgtatccgggtgattggttttactattggtatcagggtgatgcccgccttgattcgtttgatgattcggtgtgtctttcccaggtgcgggattttttaatttcttattagaaacgacgacctcaacagcttttgattgtcctttttcaattgtgaattcaattggtttttcgttcagctgatagccgtcaggcgcttttgtttcgataaatcgatactgcccgggcgctaatcctttcaccgtaaaccggcccttttgatccgtcttccataccgccggccgttctttgctgccgccggtgtttaccggatgtccggcagaatccgttatcttgaattcagcaccttccagcaccttatttttatcgtcatgatccacttttgtcagtgttacatcacccggcgtcagtgtattctccgcactgatttcgactggttttatgtcggtatttgtgatcttgaatgaaattggcgtttgatccaaactgtaaagttcaggcgcttttgtttcgataaattgatattcgcctgctttcagtccccgtacaacaatctgtccgtgctcatctgtcgtcagaccttctctcagcactttgccgtttgcatctgtcagattaaacttcgcaccttgcaggactttccgtttgtcaccttgatccaattttgtaagaacaacactgttcttgatgttaactgcagtcagggcagcctgatccggttttccgctgttctcagccttaatcgtaaaccgcacaggggttgttgacagcagataaccatccggcgcttttgtttcaacaaattgatagtttccgggcgccaaaccgccggcgtcaattttgccgccttcttttgtcatcagatcttctcttacggtttttccatcactgtcaatgattttaaatactgcaccgtctaaaacgtttccgtcttgatccttcttaaccagctggacagagcctttatagttgacaaaggtgccggtctcagacggcttcggctttccttccgctgtttctgagatggtaaactcttttttctccgtatttaacacataaccgtcaggcgctttcgtttcaatgaatgcgtaatgaccgggtgcaaggccggatgtttctacttttccgtctttatctgaaaccagatcgtcctgaaccgtttttccatcacggtcgacgattttgaagactgcaccttcaaggtttcggccttccgcatcttccttcgtcagccggacagagcctttatagttgacggccgttcctgcgtcagttgactccggctttccttccgctgtttctgagatggtaaactccactttcttcgtatttaacacatagccgtcaggcgctttcgtttcgatgaaggcgtaatgacccggggcaaggccggatgtttctacttttccgtccttatctgaaaccagatcgtcctgaactatttttccatcactatcgacgattttgaaaactgcaccttcaaggtttcggccttccgcatcttccttcgtcagcaacacagagcctttatagttgacggccgttcctgcgtcagttgactccggctttccttccgctgtttctgagatggtaaactccactttctccgtatttaacacatagccgtcaggcgctttcgtttcgatgaaggcgtaatgacccggggcaaggccggatgtttctacttttccgtccttatctgaaaccagatcgtcctgaactatttttccatcactatcgacgattttgaaaactgcgccttcaaggttcccgccgtctgcatctttcttcgttaaagcggcttttcctttataattcaccattgatcccaattcaacatcaggtacttgattcttttcgttctttgcgattgagaagtgaatggcttttgtgtttacgataaaccctgatggggctttcgtctccatcagccggtagtatccggcgggcaaaccgttgatctcaactttcccatttttatcgctttcaatattattttttatcagagtataggtaccgtcgcttgattttttctcaagcttaaatacagcaccggccaaaggattattgttttcgtcttttttgataagcgtcaccttatttttttgatttatgactttatagagtgctcctgctgcggaggatttgccgtcaatcgtaacggagaccccgtttacataagcatcgctgatggtgtagccgtccggcgcttttatttctttcagtacataggttccgtaacggatattcccaaacgtaagtttaccggcatcgtctgttgtgcccgtacgcagcagctgcttgccgtctttagaccataattgaaagtctgctcctgaaagagatgttccgtctgatcctgttttagatatcgtcaggcttcccttctcccctgaccctgagccgccgccgcttgaaatagcgacaaacactgagctgttgttctcttgggtctgctcctcaacattcgtccctgatatcgacactttgttgttgacctgaccgctgctgccggaaatattaatgagagaacgatattgtatgacatacgcacggtcgatttgtttatagccgcctgtaaaggtaagggcaaatgattgttcaccggtggcattgtcagttttcatatctaatttatagtccttatctttctcaagctgcacatcacccggaataagatttccgctgctgtctttcataacgccgttctcattatattttgcttgatatactttaaaagaatcttcatctattatttgattctcatccggtgtgtctttgacttttacgtcatccagtgtcgattggctggcattgacattgatgttccaatcgatattgtttccgttctgtttgccgcctttagaaatcaggtttcctccgtttgcgacggaaactgaacccgtcagcgttcggtctgcatggtcattattaaagtactctgctttgtttgtgtattgattctgtttaatgacctggccttttaatgacgttttaaattcaatcaggtatggtacagcgtcatctgttttgagatgtacggttaacgtatttttgttgccgtctgacggctcttctatttcatattttgaaggatccagcgcctctccttcagtgatggagccgtttttgctgatggtatacgttttaacagcaaccgacccatgcaaaaattgctgaccatctgtgatcgtatcttttatataaggatgttttgaaggttcgccattgtaattgatgccgactttccatgtgatttcttttgaaacggcgttgtatgagccgtttttgaatccgttatgggacgtctgattgttcggtgtgaagccgctcgattccttatttgtgcgtttgttgccgtttttatcggtccatgtcgactccgccgtatttttaatcgtttcgtttgaaaagtcagcgttgaattttgtcttatacgtgatcttaaactgactgtttgtttctgcgtagtccccgatcaatgctattgtaaagccttgatttccgggtttttttgttaatgtataatccgttccttctttcagcgttttgttttcagtcgtgtcttgcatgttaaatgaatcgtcaatgagcgccaggcctccgctggtgaattgatcatccagcgtccagtctttcattgtgtaaccgtttttgttaactgtgattgtccaatcaaccgtcttcttctcatagtctgcgtttgaataatgtttgatcagattctgctgaatggcggttcccggagtttcctttgagtcccccgtatctgtcattgctgtattggtgtatttgacaggactgtcaataatgaccccatcgttgacttgagattgataaatgatcttatatgctcctgtgacagtttgcttgaattttatttcaaagccgttcccgttatcagtcagcgtataatcatcaccctcttttaatggggcgccctcttgttcgctgccgttctggctgaatgtaatcggaaggactttcaatgatccgggaactagatgcagatcgtctgatccgaacgtatccttaatgccggctttggattgatcaatctttttctcaccgtagttgtacataacagcccagctgaacgtttgggtttctcctttataacctgtcgaagatttttctatcatttttccgtaacccgctgttacggaagcttccgcagaaatcggctccgcattgtctccgctgaatgccgccttgtttgtcagcgtgatgtttccgcctttacccggctttgcctcatctttaatttccgtgtcatatatgagccggtaggctgaatcaattgtcccggcgaaggtgacattaccgttttcgccaacggtataacctgaagttatctcatttccctgactcaccgagccgtcaatattcacatcaagttcatacactttcacagagcggaaagtcaattcgtccggaaggctttcagtcaatttcgcatttttaacttcttcttcctttttattaaggtcaaccgtccacgttacctttccgggattaatgcctttatccaatgaccctgatttctcaatggttttattgacattcggtttaaaataaaccgttacgtccggcgtatcagagttaaccggaaacttaatcttttgtgtggttgatccttttatttctttctgattgaattgggtgtttacatacaatgaccccttgacgttagaatcttcttttacctcgccgttaaacgtcatgatgacatggccgctcgtattaatggaaaaagttccgtacgtactatcgccgtcggtcaatggctggttcgtaatgtcattatgcataataaattctttaggcaggtcaaattcatatcgatcaccgtcgtttattgttttccccagctcattcggaatcgcccattggatggtgatattcgccggagagttcgtattcgcagggttgtttttgtcatatggttttcctttttcatccgtcaatttcacatcagttaaaatattttgcgtaatccggtttccgcctgattgaaggcttttagcggcagatttgcttgtaatcaccatttttgattgactgcgtttagcagaaggttttgatttcgttgcctgttctgctttatccccgccgtctgcagatgctgattttttctctgtcttatcctgaggttcagcaggtgttgaagaggtgtttttttctgtatcggaatccgttgttccgtctttcttcacaggtattaacacttgctgggtcttgccggcatccagttgaaaaagagcttttgccattttcgtctcatctgttatgtcgggagtaaacttcgccgacagtgtaatggagcctttggcatccccggcatccgcttcagcatcgttcactttcacttccagcgtgcttctgtttgcttcagctttatatataccgatcacccgatcagctgatttcagctcaccttcggcatcattatctaatgtaaaactttccggaatctttacggtgatattccggtcacttgcatcttctttgtgttttagtgaccattcgtatgtcagtgtcactttatctcccggtgttaaagccggttcaccggcttttgatccgtcaacggtctgctgtctgccgtctttgactgcaactgaatcaaagaacccgctctcgctatgttgtgatccggaagcggctgcgatcggagtaaagctgacaacttggctgaagatgaaaaacagcgtgaagcatgaaatcaatgccgccctcagccttttgctttttttcgggctgaacgaaaagttcctcactcccaatgtcttattcctccccttttatatagacttacgttcgaacaagccggtaagcatgggattctccttatccgaaccaaactacattgtatgaaatcggcctatacaaattctgtacatgggatcatttcagaaatagcgcacaaaaaaagaccggcatcagccggtccggtcattcaatcgtcaattgattttatcttttaattgtttatatcgttcgtattcctttatcgcctcttctacctttcccagtttattaaataactgcagtttgtattgtataattttatcgtcaccgggctctattttctcaacctgcaggcaaacgtccatcgcttgacgatcgttcttctcttggatgagaaaaccaatcagttcgtacgctttgctgagccacagatgggcaagacgcgctttttccggctctgcccacagatagccattctccatgagataatggttctcatatgacatgaccatgttcatgtgccgggttagtgcagctgcgctgagcggaggagcctctttgaatgttttttcccattcaactgtatcaatctttaccccggaaagccggagaatgtatcctatatcagtattttctattgattggctgaagggcagcttaccgattaatttccgtatctgatatattgtcgagtagagctgggtgcttgcttttgatatatcataagcaggccaaaacatctccattagcatgtctttactgaccgtgcgcccttgattaagaagtaaaaatgcatacagttcacgggctttggatgttctccacttgactgttatgtatgttttgacaccatttaccgattgataaaagtccaggttcccaaaacattgtataacataatccgtcccggtattcccgtccgccgacctgagttttttattcattcggatccgctcaacagttgtcagcagccgggcattgtcaaccggttttaatagataatcgacagcattcaattcaaacgctttgatcgcgaattcattataagcggtgataaaaataacttggatattttcattgacctcctgaatcgattcagcaagctcaataccgtttatcccgggcatttcaatgtcaagaaacaccgcatcagctgctgaaagttccgaatgctccagaacttccgccggatcttgaaacgttataatagattgaaaggcgtttgtccgctcaagcatacgattaaaatgaagcaatgccagttcctcatcatccacaattaacgctttcaaaccgcatcccacccgtcaatatagatatatctgaaaataatttcaattataccatgcccaatgccctatatagttggattctttttctttctcttgttgtattataacgtttgtgattacaatatttatacattaaataggataatagaatgcccctgaatgggataaaggagtaatgatgtgaaagaaaaatttatttcgattacgattatttgcggctatgctgctttctttatgatttttatggccatggatcatttttcaggatcatccctccctcaagcggaacagggcgtgatcaatctggaaaattgggattttcaaaaggatggaaatgtccagctgaacgggaaatggattctatatccaaatcagatgctgtcaccgcaggcgcttcattcagcaaaaggaaaaaatcccgtactcgttgatgtccctgtcaatgtgaagctgttcggaaaaacggccgacgtggattacggaacgtacaaactgacaatccgatcaaatgaagacaatcaggttttggggatcagcacatcttatatctacagttcaaaccgcctttatcttaatggaaaagtaatcggacagagcggcaatccttcagaaaaagctgattttaaggcgcagaacaaaccgtacagcagctttttcaggcttcgcaagggtgacaatgaacttgtcctgcatttttcgaatttcggaaaagttcccggctgggggatcgcaaaaccgataacgtttgggactcaagaacaaattatacgcgagaatcaaatttccttttttaatgattccattatgattacggcttttttcattaccggtttatattttctcggcttttttctgcaacggacaaaggataaacatttattgttcttttccgtgatgtgtctgcttttttcagccattattcttatgatcgggaaagaaagaattatctttctcctctttccgtctatttcattttcattgctgaattccttgcgtatcatctcaaccgtgcttgtcagcatggcggtttttctttatctcttttatgcatacagagaaattgtttcaaaaacgacgatcaccattttaaccgctttatccgggatcatcttgatcactgattttatgtccggaagtttcattgatcacctctcatacattttacattctgtgctggccgttacgactctgttttatattacatatatttttacgattgccgccataagaaaaataaaaggaagcacgtaccttacactcgcatccgtctcgatgagcgcttttgtgattcttacgaccatttcagcttacagcggcaaaacagctttttcttttaattcgatctattcattgccgacagtcatcgctttattggcggtggttctcctgatggcgcagcaattcgccggagctttccgggacaatgaagtcctctcacggaaattagtcaaaatggaccaactgaaagatgaatttatcgccaaaacttcacacgaattcaagacgccgctgaacagcattattaatatatgccaaacccttgtagccggcagaaaaaagaagacgatagaggaagagaaagaaaatatgcagctgatcatccgtatgggctacagactttccgatctcgtaaatgatattcttgatttggaaaaaatgaagcaggggatgctgcagattcgtccggttcccgtcgatgtgcatgccgtcatatgcagtgagatgaacttctaccggcttttatccaaacataaaaaactcgcgattcttaatcatgtgccggacgatctccctttggtgcttgcagatgaaaaccgattccggcaaatcttaaccaatcttattgaaaatgcaatcaagtacacatccgaggggaacattattctttccgccgcaaacctgaatgacaaaatgattcaaataaccgtgaccgattccggcagcggcattcctgaggctgatcttgaaaccatttttgattcttttcagcaagcgggagggaaggaagaagatggaacgggtttaggtttaagtattgtgaaacagctcgtcaagctccaaaacggggacatctgggcggagtcagcggcggcgcaaggatcagcctttcattttacgttacccgccgctcaaattgtttctttaccggaagcaaagaccgaacttcctaaatcacagcccggacagagaataccggatatttcgttggtcacgccttatcactcagagaaaatcgatgctccgacgattctgattgtcgacgataatatcgagagtttgaaaattttaattgatatgctggaaggtgttccttataacgtaatcgcagtaaaaagcggaaaagaggcgcttcaagctgtctcttcctcgaagcttgacttggtcatattagacttgatgatgcctgacatgacgggttttgaagtctgcacaaacatccgcgaaaggttcagcatggtcgatctgccggttcttatcgttacggcagccattatcagccatgacaaatacaaggcgtttcatgccggagcaaacgacattttacaaaagccttatcattactctgaattcaccgcgcgtattaaaaatttaattttaatgaagcatacggctcaccaagccacaaatttagaaatggcatttcttcagtcgcagattaagcctcattttctttacaatgtattaaatacgattatcgcgctcagccatttggatattgaaaaagcaagggaaaccactgctgcatttacaaactatttaaggatgagttttgattttcaaaacacttcggacatcagctcattcagaaacgaactttctatcattacgtcatatctttctatagaaaaaacacgcttcggcaaacggcttgatatcctttttgatattgaacaggacattgacttcccccttccgcctttaatgatacagccattggtggaaaacgccgttcatcacgggatcagtaagaaaagaggcggcggacggataaagctgacagcgaaaaaacaaggcgaaaacacgtatcttatcaaagtggaggataatggaaccggcatcatgccggacatacagaaagatattttgtcttctgatgttaatcgcagtgtcggcctgaaaaatatcaatcggcggctgaagcatttttgcggaagcgaattgacgatcaccagcaccccggatgagggcaccgctgtttcgatgatgattcacactcccggcacaacggatgattcgaactcactgaaaacgtcttcattaagatactgattaacttcaaaaggcatgtaaatacttctgccgactgtcgggaaattcccgtcagcctttacagaaagacgtaaaaacaaaaaagcttgaagaaaaaatgatatcttctccaagcttagcttagatgatccgcaccagtctggccgttctcacttaagaaatcgtaacccccgcgcttgcatatcccgccactgtattaataagcgaaaggcctgtcgcagtggcagagaataccattaacagccgggtttgaggagttaccgcaatgttcagccctgtcgtgattccgttgctgatgctgccgattgacaatacgccggtgaggggaggagctaaagtgacggatgctccggggatcggcgtgaacgtattgttcggcacagtagaactgtatagttgtgcggttatcgtaacagtcgagccgacaagcgacaatgctgcggttgtactgaaataggcggcaattgatgtaatggttccgcttctcggagcagaaaaagcaaagttcagcagagttcctccagccccggtaagatcaattgcacctccccctccgacattgacgcccgtcacagaattgccgaacccgacaaggctcaccgttccgattaatccgccggcaatggtcgtcacggcagtgggaagacctgaagcgtaaggaatgatcgcgcctgctccggtgatcccggtggcgcctgttgctccagtagcgcctgttactccggttactccggtgatcccggtggcgcctgttgctccagtagccccggttgctccggttgctcccgttactccggtcgatccggttaccccagttactccagtcgctccggtgatcccagttactccagtcgctccggtgatcccagttgcacctgttattcctgtcgctcctgttactccggtagcgcctgttaccccggtagctcccgttattcctgtcgctcctgttactcccgttactcccgttactcctgttactcctgttactcccgttactccggtcgatccggttaccccagttactccagtcgctccggtgatcccagtggctcctgtagcgccagtatccccggttactccggttgcgcctgttactccggtcactccggttaccccagttactccagtagccccggttgcccccgttactccagtcgctccggttgcccccgttactccagtcgctccggttaccccggtggctcccgttactcctgtcgctcctgttatcccagtggctccagttatcccagtggctccagtagccccggtggctcctgttactccggttaccccagttactccggtagctccggtgatcccagtggctcccgttactccaatcgctccggttacgcctgttaccccggtggctcctgttattcctgtcgctcccgttactccggtcgtgcccgttatcccggtagctccagtatccccggttactccagtggctcccgttactccaatcgctccggttacgcctgttaccccggtggctcctgttattcctgtcgctcccgttactcctgtcgctccggttaccccggtagcgcctgttatcccggtggctcccgttactcccgtggcgccgggatctccagtgactccagtggcaccggttaccccagtcgctccggtattcccggtcgagcccgttgctccggtcagtcctgttgctccagtgaaccccgttgctccagtcagccctgttgctccagtgaaccccgttgctccagtcagccctgttgctccagtgaaccccgttgctccagtcagccctgttgctccggtcagtcctgttgctccggtcagtcctgttgctccggtcagtcctgttgctccggtgcaccccgttgctccggtgaatcctcttacgtgaaaatgatttggatgacagcatggacaccatctttcatgacagcaagggggttcgcaacagaatccttcacagcaatgtgcccgattttgataactgcgcctttgatttcttcttttatgttgaaaatgacagcaacactcattacaatttcggcagtcgtaatcccaagaatcgtatctgttataccaagtatctccttttctcattacaccacctctattttcataatatttccacagagaaaaaaggtgtggcaaaaccccacttctattgggcaatttttcaaatgttcgttaagactgcatcatgcacagcattttacagaaaaaagacctaactgtgcataagtcaggtctttcatctttaaaatatcagtctgctgttgtattaggttgtcggaaaacttatgctgttaaaatcgatattgagtgcagttgctgtcgttaaattattagcagttgtgaaaataaccctgagctggtaagtgttcgttcctgcggtcggcgcagtatccactgttgtatcagcaatcgaaaaactatccgtagctgcgagagtactggttcgcgacagagttcttgtatgaatttgcactgctcccctatataatctcacttcaaaaacaaagtttgaattcgctgcagttgttaacgcggcactgagtgcataatccagctttacattctgcaaagcattaactgggattgccagcgtagcaacgggaacttctgtatttaacggcggataaacagtgagcggcccgttggttcttgtgaagagcaaggttggtgtactgcctgtggcgccggttggtccggttgggcccgttactccagttgggccagtcaccccggttactccggttgatcccgttactcctgttactcccgttgctcctgttactccggttgctcccgttactcccgttactccggttgctcctgttactcccgttactccggttgctcctgttactcccgttgctccagttgctccagttgctcctgtcacacccgttgctccagtcacacccgttggaccggttgggcctgttactccggttgcacccgttactcctgttactccagttactcctgttactccagttgctccagtggctcctgttgctccagtcacacccgttgctccagttacacccgttgctccagttacacccgttgctccagttacacccgttgctccagttacacccgttgctccagttacacccgttgctccagttacacccgttgctccagttacacccgttgctccagttacacccgttgctccagttacacccgttgctccagttacacccgttgctccagttacacccgttgctccagtcacacccgttggaccggttgggcctgttactcccgttgctccagttagtcctgttacacctgttggacccgtttctccggttgaacctgttactcctgttgcgccagtcgctccggttatccccgttgccccagtcactccagtggctcctgttgatcccgttactcctgtggctcctgttggacccgtgattcctgttgggccagtttctccagtggcccctgttactcctgttggacccgtttctccggttgaacctgttactcctgttgcgccagtcgctccggttatccccgttgccccagtcactccagtggctcctgttgatcccgttactcctgtggctccagtcacacccgttgctccagtcacacccgttgaaccggtttctccggttgagccagtaacccctgttgatccagtcacaccggttacaccagttgagcccgttgctccggtttctcctgttggtccagtcacaccggttgggcccgtcgcgcctgttgctccggttatccccgttgctccagtcactcctgttgcaccggtttctcccgttgtcccagttaccccggttggaccggtcgctccagttacccccgttgccccagttgctccggttgggccagttgctccggttgggccagtcgctccggtttctcctgtcgcccctgttactcctgtcgcccctgttactccggttgagcctgttgatccggttacaccagttaccccagtcgatcctgttgctcctgtggctccagtcacacccgttgaaccggtttctcctgttggtccagtcacaccggttgggcccgtcgcgcctgttgctcctgttatccccgttgctccagtcactccagttgcaccggtttctcccgttgtcccagttactccggttgatcccgtggttccggtttctcctgttacacctgttgggcctgttactcccgtcgctcctgtttcaccagttgggccggttgagccagttacaccggttattcctgttgaccctgttacaccggtcgctccggtttctcctattgaaccagttgatccggttgctccagttactcccgttgaaccagttgatccggttggaccggtcgctccagttacccccgttgccccagttgctcctgtcactcccgttgaaccagttgctcctgtcactcccgttgaaccagttgctcctgtcactcccgttgaaccagttgagcctgttgctccggttacaccagttaccccagtcgatcctgttgctccggtttctccagttattcccgttgcgccggtcgccccggatgcacccgttgcgccagttgagccggtttctcccgttgctccagtcacacccgttggaccggttgcgccagtcgatccagttgcaccggtttctcctgttgagccagtcgcgccagttggacccgttactccggttgcgccggttgagccagtcgcgccagttggacccgttactccggttgcgccggttgagccagttgagccagttgagccagttgagccagttgcaccggttgagccagttggtccgatttctccagttacccccgttgcccctgttgcgccggtttctcctgtcgctcctgttactccagttgagcccgtggttccggttgctcctgttgatcctgttaaacctgttggccctgttgcgccggttgggcctgtcgatcctgtggcgcctgtttctccagttaatcccgtcgcaccagttgagccggttactcccgttaccccagtcgctcctgtcgatcccgttacaccagttagacccgttactccggtggggccggttgctcccgttaccccagtcgctcctgtcgatcccgttacaccagttagacccgttactccggtggggccggttgctcccgttaccccagtcgctcctgtcgatcccgttacaccagttagacccgttactccggtggctcctgttgctccagtcactccggttggtcccgttgctcctgttaaaccagttgaacctgttcccccggttgcgcctgtttctccagttattcccgtcgcaccagttgagccggttgagccggctgctcctgtcggtccggttgggcccgttcccccggttacacccgttaccccagtcgctccggttatccccgttgtcccagtcactcctgttggacccgttacacccgttaggcctgttgtacctgttactccagttgacccggttgctcctgttgatcccgttactccggttgcacctgttgctccggttgggccagttgatccggttgctccggtttctccagttattcccgttgcaccggttgagccggtttctcccgttgagccagtcggtccggttattcctgttgacccagttacaccggtcgctccagttactccagttgagcccgtggctccggtttctcctgttgagccagtaacccctgttggtccagtcacaccggttgggctcgtcgcacctgttgctcctgttatccccgttgctccagtcactccagttgcaccggtttctcccgttgtcccagttactccggtttctcctgttacacctgttgggccggttggaccggttggaccggtcgatccggttattccagttgaaccagttactcccgtggctccggttggtcccgtttctcccgttgcaccggttactcctgttgtcccagttaccccagtcgctcctgtcgatcccgttgcaccggttgaacctgttactcctgttgatccggttactcccgtcaccccggttgttcctgttgaaccagtttctccggttgaacccgttgctccgattggaccggtctctccagttacccccgttgcccctgttgggccggttactccagtagctccggtatccccggtcgagccagtttccccggttgctccagttactccagttgcaccggtttctcccgttggacctgttactccggttgagccggttatccccgtcgcaccggtggctcctgttgctccagtcactccggttggtcccgttgctcctgttaaaccagttgaacctgttcccccggttgcgcctgtttctccagttattcccgtcgcaccagttgagccggttgagccggctgctcctgtcggtccggttgggcccgttcccccagttacacccgttgcccctgttgcgccggttgggccgcttggtccggttgggccggtcgatcccgttacccctgttactccggtcgctcctgttactcccgttacaccggttgggccggttgagccagttactcctgttgggccagtttctcccgttgcaccggttgatcctgttactcccgttacacccgtttcaccagttgggcctgttacccccgttgctccggttgggccggttgttcccgttcccccggttataccagttaccccagtcgctcccgttgcaccggtttctccggttgagcctggcgatccagttggaccgatctctcccgtgggtccagttgatcctgctgcaccagtaactccagttgaacctgtcgacccggttggaccggttggaccggttgatcccgttgctcctgttactcccgttgctcctgttgaaccagttgaacctgttcccccggttgcgccggtttctcctgtcggtccggttgggcccgttccccagttacacccgttgcccctgttactccggtcgctcctgttactcccgttacaccggttgggccggttgagccagttactcctgttgggccagtttctcccgttgcaccggttgatcctgttactcctgttgatccggttactcccgtcgccccggtttctccggttgaaccagttgggcctgttacaccagtcgctccggtttctcctgttgcaccagttactccagtagctccagttactccagtagctccagtatccccggtcgagccagttgggccggtttctcctgtcgaccctgttcccccggttggacctgtcgaccctgttcccccggttggacctgtcgaccctgttcccccggttggacctgtcgaccctgttcccccggttggacctgttattccggttgggccggttgggccggttgatcccgttgctcctgttactccagttgagcctgatgagccagtcgcgcctgtttctcctgttactcccgttgcaccggttgcaccggtttctcccgttgagcccgtcggtccggttgaacccgttgcccctgttattccggttgaacctgtagatccagttggaccggtctctccagttgcgccgatttctccagttacacccattgcccctgttgggccggttgggccggttgagcctgtagatcccgttacccctgttactccggtcgctcccgttacacccgttgcccctgttgggccggttactccagtagctcccgttgcaccggtttctccggttgagcctggcgatcccgttggaccgatctctcccgtgggtccagttgatcctgctgcaccagtaactccagttgaacctgtcgaccctgttggcccggttggaccggttgatcccgttgctcctgttgaaccagttgaacctgttcccccggttgcgccggtttctccagttaatcccgtcgcaccagttgagccggttgatcctgtcggtccggttggtcccgttaccccggtcgatccggttatccccgttgtcccagttactcctgttggacccgttacacccgttaggcctgttgtacctgttactccagttgacccggttgctcctgttgatcccgttactccggttgggccggttgctcctgttgagccagtcgcgcctgttgatccggttgaacctgtcactcccgttgaaccagttgagcctgttgatccggttacaccagttaacccagtcgatcctgttgctccggtttctcccgttgtcccagttactccagttgggcccgtttctcccgttgatcctgttactccagttgatcccgttgcgccagtcgatccggttactcccgtcgctccagtttctcctgttgaaccagttacaccagttgcaccggtttctcctgttgaaccagttacaccagttgagccggtttctccggttgagcctgttgcaccagtcactcctgttgggccagtttctccggttgcgccagtaactcctattggaccggttgagccggttggaccggttgagccagtcgcgcctgtttcccccgttggacctgttactccggttgagccggttatccccgtcgccccggttgctcctgtcgatcccgtgaccccgatcgggccagtcacaccagtttctccggttgaacctgttggtcccgttcccccagttacacccgttgcccctgttgggccggttgggccggttgggcctgtcgatcccgttacccctgttactccggtcgctcctgttactcccgttacaccggttgagccagttactcctgttgaaccagtttctcccgttgcaccggttgatcctgttaccccagtcgagcctgtcgatcccgttgcaccggttaatcctgttactcctgttgatccggttactcccgtcgccccggtttctccggtttcaccagttgggccggttgttcccgttatgccagtcgagcctgttgctcctgttactccagttggaccggttgttcctgttgggcctgttgctccagttactcccgttgaaccagttgctccggttggaccggtttctcctgtcgcccctgttactccggttgggccggtttctcctgtcgatccagttggacctgttataccggtcgcgccggttatccccgttgctccggatgggcctgttgctcctgttatccccgttgctccagttgggccggttgttcccgttcccccagttacacccgttaccccagtcgctccggttgaaccggttgaaccagttgctcccgttactccagtcactccggttgagcccgtggttccggtcgctcctgttacaccagtcgagccggttgctccagttactcctgtcggaccagttactccgtttggaccggttacacccgtcgctcctcttgccccggttgcaccagttactcccgtcgctcctcttgcgccggtcactcctgttgggcccgtcactccagtgggacctgtaattcctgttacgccaggttcacccccggtttgcgccaatgaaacatcgtctattaaaaccgtgccggaagaaactttacttaatacaatgacggcagaggccgcgccagaaggcacactgcttgttttatagatttcagaccatgtgtgaaagagcacgttcggcaaatttccgggtgtaatattttcttgaatggaactgatttgttcacctgctgcgctgacatagatgatctggagagtgacttggggacttggatcatttccgagcgttgcgagtgatacgaatagagtcactgacttggctgaaatgggaacgatttgactgaggtaagcatatggctgagctccaataaattgcgcagaatatctccctgaatgtgcaaacaaactgttaatctgggtatttgccgaactccaccccgctaatgtgccggtttcaaagcttccgtttataatcggattattcattcaatctttttccctctccttcccgttgttgaccgtcttacttattaagacagcatattaatacgggctgtgttttgacaacctaaataaaaaaggtgatttcttttcatcaccttaatccgatccttgaatggggaatcccgtcgcaatgagggagcggtttgctgctgcgacttgtgttacgtagttcgaagaaaggacggataaatagagctgatacgcggctgtttcatccgccttcatttcgtcgatgtacgtaaaaggaattcctatgatttgtccgcctgaagaaaagaggttccgctcttgtctctgtgtttgtatcgttacgccatttctttgcagctcgacagctaagaccaatgagaaatgagacgcaagcggatctaattccacatttacttgtatgacggcatccgttttcaccaattgatctgtcggcgcagctatcactgcgcttaacacgtttatcggtgttccttctaacggaagcgtcattaggtctgctgtattttgaaaagctaccgcaggaaccgctcccggcggcccctcaggccccgggggaccgggcggaccgggcggacccggcggacccgcctccccttgcggaccgcgggagccggcgggtcctcttttgccttcgggacctcgcagcccgggtacgcacaaggcagatcgattttcatttgaagacggaaaccgtttttccgtccctgtttccggactttcaagttcacatggtaattgttcataccggcgtttcatatgtctgctcatatatttgtaaggtttctgtttcaatatcatgtattgattacggccgctgctcataatatcaccccggcaatattctattcgcactgaagtcagcgtgtgcaggcccttcccattccttacagaaataaaaaaaaggcagacctgagtctgccttttttcttctaccataaccctaatactttccaccataatccgccgatcacaagccatgtcacaatatggacgattgacaggataaagccgatggaccaccatttgctttgcgagatataacccgctccgaaaaagaccggagccgctcctgagccgtaatgcgtcgtcgaaccgaaaaggttgctgaaaaacgccaggctgagcgccgccaacagcggcggagcgcctgccgccacgatgacggcgagaaatgccgcatacatggcgctgatatgcgcggttgcgctcgcaaagaagtaatgcgtgtaataatacacgacaatcagaatcataaatgccacaatccatgaaaaaccggaaacagatgatttcatcatattgctgaaccaagacaccatgccgagctcattcaggaaattcgccagcatcacaagcgccgcgaaccaagtcagcgtatcccatgcaccttgttcttttttgatgtcctcccatgttaatacctgtgacaaaagcaaaacggataatccgatcagggccgtcgtcgttgcgtcgatatttaagcttcctccgaaaatccacagcgcaagcaccaataaaaagacgataaccatggagagttcggattttttaaacggacccatttctttcaatttttccgttgcgattttagccgcgtccggtgtttctttaatttccggcggatacagcttataaatgacgagcggcgtaatgattaagctcgccaatcccggtacaatggccgcgattgcccagcttgtccatgtgatgtccacccctgcgacatcgtgggccagcttggcgatcagcggattcgccgccattgccgtcaaaaacatcgcagacgtaatcaagtttccttgaaaaccggtttttaataagaaagcgccgattttccgctctgttccgtctgccggcgttgatccgaaagtttcggataatgatctgataataggaaaaataatgccgcccgcccgtgccgtgttgctcggaatggcaggtgataaaattaaatcactgaacagcagtgaataagaaaggccgagtgttttcttcccgaaccgttgtacgaatacgtaagaaatcctggcgccaagcccggttttgataaatccccgggaaataaaaaaggcgatgacaatcagccagattgtcttgtttccaaatccgcttaacgtattttcaatagatagcgttcccgttaacgcggtgactgccaatgcaaaaattgcaattgcgcccattggcaagggcttggagataaagccgataattgttgcgacaaaaatagcgaacaaatgccatgctttaggttcaagtccggacggcgcgggaataaaccaaatgattaatcccacagcaacagtaataagcaaaggaatgatttttactgcctgctgtttttttgcgtctttttctgaagccattacaggtctcctcctattttgttgtcttccatccccctatcccattttactacttaactaagttaataaacgtttttgttaattaaaaaacacaaaggaatattttcctttgtgcttcttgtttattattttaatatacccgacccggctttagatataacatctgattttacatttgatgatgagccgatggaaccgtgcaatgacggtgtccagccgacggactgacttaatccgttggcagctgacgcgttaattgcggcgccgtttaaaagagtgccgtcttcatgaagtgcttttccgccgctgaagacgctgatgactttatcagcagccagtcccggcacttcaaagacattattctgggcatatatttttgacgcgtggcctgcgccccacgcatagctgaacgggtatgcggcgcttttagagcctgcgtaaaaattattataaatatgaacctgcccgtaccggacccgcggtgcgcgctggacgatgttctggtaatagttatggtgaatggtcaccttcagttttccttcatccgacgtcttgctgtcgctgtttccgatgacggagcctttgtcatggtcatgatatttattataggacaatgtaatataattcgccccgttggctatatccgtctggccgtcatggtgctgatattttctcccgtaatagtagggaaaaccgctgtcgggattcgatccgtcattaaaggtgcaatgatcgatccagatatgcgtcgcgccgttaatggtgatattgtcatattccgagttccagttgccgctgctgccgtccgtcgggtcccattgcggaaaatagtcgtaagcgtcttgaaattcaatgttgcggatgatgacattgtcgacgccgttctttatattaaaacttccgcctgtcactttggcatttgaacccgaaccgatgatcgtcgtatttgaaggaatgtcaatcacgacccgtgctttctggtttttttgagatcgctgtctggcgtcttcctgggtgcctgacggcgcttttttcccccatttgtccgggtcgtacgccttcagataagcgttgagatcatatgccggatctttataatcattaaagccgagcgttttattccggtcgtccgtattcatattgattgtgccttgtatgtaaataatcttcggcgtgctgttggcgcttccccctaatgcagaaacgagctgctgtctgtttgatacggtgtagacattcgataaagaggctttcgcgccgccggttgtcccgccggaagcggctccccagccgtcatttgttcctaacgtctgccgtcccaggtcagcggcatagacgtccgcagggatcatacataaacaaaccgccagcataagtaacatttttttcatgaattgtgctcctcctgattctctgttccaatttattacaattggattgtatcaaatcagttgagaaacggcaccgaaaatgtacagcatgtgcctttcggttttattgcggaaaccgcaaaaaaatcccaagggaccgaaaaccccttgggatctgttcagcttacgcccatgattttactttttcgttatccgtgacaaacagaagaacttttccttcatctaagcgcttttcaaattgtgatgcttcctcttctgaaaagccgatttcgtgaattttgttgcggagctcgtcgccttttttattaaacatattgccgaccgcgtgtttaatgcccgtttctttcgctccgatggtattgacatcagtattatccgccagacggtccgttctgtcgtcatcatgtgaaagcacatatacgtcttcttttgcgacacccaattgctgaagctcttttacgtcctgcatcagtttttgatcatttgtatattctcttactaccggtttcattgataagtcctcccttttgtttttgtatattggatgtttacccgctcaaccaaaggtcaaacaaaagaaagagagttccgggaaaaaacgggcagattgtcggtggatattttccggcgggacatgttacagtagggaaagtaacttttatcagaaaaataaaaatcttcatgagccgattaagcagggaggtggttcctattcattacttttcaccggaacagcgatttaacgcttgggttgtcagtgatttagtgaagcaggtattccgccggcatacccgctgcccggatggaataaaagagcttacggcctttgctgaagatacttttcatattaatatcgatttcgttttctctatcattatcaatatcggtgatatcgaatccgttctgccgacagaaattgaaaataagctgggttcttatctgaccgcgcttcagcccgtgattacctctgacatgcttcattcttcaaaaacgaatgcctatgaatatttggaacatgagaaaaacaccgatgtgtaccggttattcttttaaatacgcatataagaaaagaagggccctggcccttctttttttgttgccggcggacggtttgattttgtattcgggaaatggttcgtgttacatttggaacaaccacttatcttgaaggaggattcagtatgccgaataatcagcagcagattcaattggcaagacgcccgaaaggcgttcccgtccatgacgatttccgctttgaaacgattgccgttcccgaaccgaaagacggcgaagtgcttgtgaaaacgagttatgtgtccgttgatccgtacatgcgcggacggatgcaggatacaaaatcatatgtagagccgttcgctttagatgaagccataacaggcggagtgattgccgaagttctgacagacggcgataagctgaaaaaaggagatgttgtgatcggaaatctcgcatggcaggaatattcagccgtcaatgagtccgccctccgcaagttggatacggatatcgcacccgcccaggcgtatctcggcattttagggatgaccggactgaccgcttacttcggcctgcttgatatcgggcgtccgaaaaaaggcgaaaccgtcgtcgtttcaggggctgcaggcgccgtcggctcaacggtcgggcagattgccaaaatcaaaggcgcgcgggttgtcggcatcgccggttctgacgaaaaaatcgcgtatcttaaagaggagcttcaatttgatgaagccattaattacaaaacggcggatgatattcaaaaagcgcttgaacaggcatgccctgacggcgtcgatgtctattttgacaatgtcggcggaccgatttcagatgcggtgataaacctgctgaatgaattcgcccgcattccggtatgcggagcgatctcttcatataataccgaaagtgaagaggaagacatgggcccccgcgtccagccgaagctgatcaaaacaaaagcgctgatgcaggggttcatcgtcagtgattatgctgaccgcttttccgaaggcgcgaaacaattggccgaatggctcaaggacgggaagcttcattatgaagaaacgattacggaaggattcagccatattcctgacgcgttcctcggtttgtttaaaggagaaaacaaaggcaaacagatcatcaaagtcagtgatctaggttaacatgatgatgaaaaaaggagggctttgtcccctccttttctgctttttcgcatcagccgcgaagaatcaaagtaagaaagccgtcttcatcaggctccgtattttccaaagtgaatcccgctgcttgaaagcagactaaactgatttgattgtctttttagatgcttgccgcccattcccgcacgccggtaaacccaggatcagtcagcagtttttgcaagatctgttttccgtacccttgaagctggtacaaaggattgacgatcaatccgatatacgcccgttcctccacaaactctatagagaccattcctgccggaagctgcccgtcatatgccataatgacagtatcgtcttcatctttactcaatcgtgcataccatgcatttagtggccgcatcgcatccattctccgtctgatattatcgttcttaaaccagtgttcaagtattttcagctcacgtaccttcaatatttgaaatcggtctattgaaaccatcttcccgcccccgcctgaaccttttctattatttcacaataaaaaagaagggcttcccgccctccgtttcttatttctcagataattttccgcctgaataaacggcctctttcagctcaattccgagtgatttggccatttttttcaatttggattcttccatcggcgtgacaaggctgagtacggttccttctttaccggcccgccccgtccggccggatctgtggatatatccgtcttcattcgggatgtctgcgtgaatgacgtacggaagatcatcgatatcaagtccgcgcgccgctatgtcagtcgccagaagcagcggaaattctcccccttcaaacgctgataatatctttgcccgctccatttttttcgcttctccgtgcaggatgccgagatccacgtgatgataggcgagtttttccgcatagacgcttaaatttccgatatctctgacaaacacgagcgcctgcatgccgttcagccgtgacagcttttgcaatagcttcactttatcccgctgatcgcagacgagatattgatgcgtgacgcgcgctttttccgccgtattccgcgccactttcaaaacggccggttcatgtgcgatggcattcagcacctcttctgtctccggctgcagcgtagcggaaaagcttaaaagctgtcggtctttcagcgtcgttttaatgatttttttcatcgtttcgcggtgttcctttgtcacgagctgatccgcttcatcaagaacgatcgtcttgacttcatgcattttcagctttttcgcctgaatcaattcgagcaccctgcccggtgtgcctgcaatgatatgcggtttatttttgagcttctccacctgctttttcacgtttgccccgccgatcaaagacaaagcgcgaagatcggagccttttttccactcctgaatcacttgaaaaatctgcatcacaagctcgcgggacggcgctaaaatgatcacttgcggatgtttctgttccgggttgatccgctccagaaccggaagcgtgtacgccaatgtttttcccgttcccgtcggggattcggcaatgacgtctttcccttccatgatcacctgagcggctttttcctgaataacggtcggctcctgaaagcctgacgcctcccagttttcggcgataaatggttgtgtatgctgtaaaaatggccatgtttgggtcatgtcgttctcctcaattcttaaaatctactccatagtatctcaaatgcacgcggcaaacgcaattttctttttccttccaagccttttaacaaacggtctcctcctttataatcataaatgagaaagacacatgataaaaaaagcgtgtctgataacgatagaggtgtaatgatgagtattttatccgtaaaagatttaagccacggcttcggtgaccgtgcgctttttaacaatgtatcgttccgtcttttaaaaggggaacacgtcggcttaatcggagcaaacggcgaaggtaaatcaacgtttatgaatattattaccggaaagcttgagcctgatgagggtaaggttgaatgggcgaaaaacgtgcgtgtcggctatctcgatcagcataccgtgcttgaaaaaggaaaaacgatccgcgacgtgctgaaggatgcgttccattacttatttgcgatggaagaagaaatgaacgagatttacaacaaaatgggcgaagcggaccctgatgagcttgagcagctgcttgaagatgtcggtgtcattcaggacgccctgacaaacaatgatttctacgtgattgacagcaaagttgaagaaatcgcccgcggcctcggcctgcaggaagtcggcctagaccgcgacgtcactgacttaagcggcggacagcggacgaaagtgctgctcgccaaactgcttttggaaaagccggaaattcttctgttggacgaaccgacgaactaccttgatgaacagcatattgaatggctgaaacgctatttgcaggaatatgaaaatgcgttcatcttaatttctcacgacattccgtttttaaacagcgtaatcaatttgatttatcatgtggaaaaccaagagctgacgcgttatgtcggtgattatcatcagtttatggaagtctacgaagtgaaaaaacagcagctcgaagccgcctacaaaaaacagcagcaggaagtggctgagctgaaagatttcgtcgcccgcaacaaagcccgcgtcagcacgagaaatatggcgatgtcccgtcagaaaaagcttgataagatggatatgatcgaactggcggccgaaaaaccgaaaccggaattccatttcaagcctgcgagaacgtcaggcaagctcatttttgaaacgaaggacttagtcatcggttacgatactccgctgtcacgcccgctcaatctcagaatggagcgcggacagaaagtcgccctgtacggcgcaaacggcatcgggaaaacgacgctgttaaaaagcctgctcggtgaaatccagccgctggaaggcacggtggagcgcggcgagcatcaatacacgggctatttcgagcaggaagtgaaagaaaccaataacaatacgtgcatcgaagaagtgtggagcgaatttccttcctttacccaatacgaaatccgcgccgccctcgccaaatgcggcctgacgaccaaacacattgaaagccgcgtctccgttctcagcggaggagaaaaagcgaaggtcagactgtgcaagctgatcaattcagaaacaaacctgctcgtgcttgacgaaccgacaaaccacctggatgtcgatgcgaaagaagagctgaaacgcgcgctgaaagaatacaaaggctccattctgctgatttcccacgaacccgagttctacatggatatcgcgacggaaacatggaattgtgaatcttggacgacgaaagtgctgtaaacacaaaaaggaactcccgcccgtgcggaagttcctttttttaatgtccggcttttattccggcaagatgtttgcgtcccataagaagaacaagcatgccgacaaaaacgacaatcccgcctactgtatatggtgtgcttgcggtgaagtgttctgacagcattcccgcaatccacggagcgagcgcaccgccgataaagcggactgagctgtaggctgaagacgcgatggaacgttcaaccggcgcagcacccatcacagcggttgtcatgatcgtattcaccataccgaggacagcaccggcaacaacgatacatgtaatgatcaacgtctgatggtcagtccagacccccataataacgagaatggccgcaaaggcgataaagagaacgacgagcgaacgcactgtgcccagcgctttatgcacgagcggcgccgtaaagactgacgtaattgccagcagaaggccccagccgaagaagacgtatccgagaccgtgttcatctaaatccagaacgaacggagaataagcaagcaaaataaaaaatccaaagttgtataagaatgcagatactgccattgtcaaaaggcctttatatttgagcgccttcatcgcatcaaacacaccgacgcgtttcgccggtttcggcagcttcggcagcatgagtgaaatcgcgcaaagcgctataaacatcaggacagacactccgaagaacggagcgcgccatgaaaggctgcctagctctccgccggcaagcggcccgacagaaattcccagtccgagcgcggcctcatacagaataatagctttggcgctgccgccgacagatacaccgacgatgacggcaagcgcggttgaaataaagagagcattcccaagtccccagccgccgcgatagccgacaagctgagcgattgaacttgagcttccgccgagagcggcaaacacgatgataaaaataagtccgagaagcagcgtccattttgcgccgatccggcttgaaatcgcgccggagaaaaacatcataaaaccggtaacgagcaaataacttgtaaataacagagatacttcactaggtgaagcatgtaattgtgcggcgattgccggaagaattggatcgacaagaccgattcccataaaggaaatcacacaggcaaacgcaaccgcccaaacggctttcggctggctgaataagcctgttttctgttgtgatgatgtatccatttgaccagacctcctgttttatccattaaaagaaacgctatatccatagcgtttacagcaaaatcattcgattgattgaatggcgcggtcagctttttctttcattccgttaaggcgcgttttaaaatgctgaaatgtgctgatcttctcatcaatcatctcaagctggtggttcaaagcgtgctgaatctcttccagcttttctttccgttccttcggatccagtgacaacaagtacccctctttgtttaattccagctgacggctcatctccataaactgctgaagttcctgaagggaaaaaccgagcacttcttttgtgctggtgactttttcgagctcctccatatcatcttcagagtaaagccggacgccgccttctgtccgtttaggagcaggaatcaaaccaatctcctcgtaaaaacgaatggttcgttttgtcaatccgcttcgcttggcaacttgatcaatcttcatccattccaaggtgaatccccctcttgtcgtatctgtttctattatacaccatttgaaccttaacgtaaacgtaaactttttatgccggataaacttggcttggacggaacctttgtctttaaagcgccgggagacatctgtgtaagataaaaaaagccggtatgacccgccatcttctcggggccgtaccggcttttcttaattctcaagttcttcaatcatcagtgacaattcggtccagcgttccatcgccgcttcaagctcttcagccgtttttgcctgttcggccatcagttcttgtatctttccgaaatcacttcccgcttcagcgatttccgcttccagacgctgatgcttttcttcaaggccggcgattttgtcttcgatgccgtcccattcgatctgatccttgtacgaaagctttttgcgctttttcttcggctcttcttccgcctttttctcttcggccggctgttttaccgccgtcttcttctcttttgcttgttccatgtattcactgtatgaaccttggaaacgggaaatgacaccgtgtccttcaaatacgatcaggcggtccacgacgcggtcaaggaaatagcggtcatgggatacggtgatgacgacgcccgggaactgttcgatataatcctcgagcacgcttaatgtttctgtgtccagatcattggtcggttcatctaaaaacagcacattcggctcctgcatcagtacattcagcaagtacagacggcgtttttccccgcctgacagctttctgatatatgtctgctgcatcggacgcgggaacagaaaacgctcaagcatttgttccgcggtgatgacatcgccttccgccgttttgacgatttcggccgtctcttttatatattcaatgactttcatatcgccgttcatttcgctgtgatcctgggtgtagtagccgatccggaccgtctgcccgatggtgatattgccgctgtcaggctgaattctgccggcgaggctgtttaaaagtgtcgttttcccgattccgttcggcccgatgatgccgattcgttccccagggatgacaagctcattaaactggctgatcagcgcttggccgttataggtaatggagacgttatcggcttcgattacttgttttccgagacggtgggaaccgatcgcgaaatcgagtgatccggagactgccggccctttttgctccttgagcgcctccgctctgtccactctcgctttttgtttcgtcgagcgcgctttcgctcctcttctgagccacgccaattcgcggcgcaggaggttttggcgttttgtttctttctgctctgccagcgcctcccgttcggcccgtttttccaggaatacttcatagtttcctttatacgtataaaggctgcctctctcaagctcgtaaattctgttcgtcaccctgttcagaaaatatctgtcgtgcgtgacaagcataacggcgcccggatattgcgataagtagccttccagccattcaatcgtttcattgtccaagtggtttgtcggttcatccaaaatgagcaggtcagccggctggatgacgtttttcgcaatcgcgacgcgctttctctggccgccggacagctcgctgacatccttcatcagatcggtgacgccaagtttggttaaaaccgttttggctaacgtattcgcctcccacgcatcattcgcgtccattcgggcctgcgcatcaagcaggtgtttctgacgctggtcattttccggttcttcattcagcgcctgaagcgctttttcgtactctctcatcgttctcatgacggctgatccgccggaataaatatgttcaagaacggtttgtccggccggaagctcagggtcctgatgcaagaactcaatatgcacgtttcctgaagccgtaatctcgccttcctccgttgattcaaggccggcaatggttttcagaagcgtagacttccccgttccgttcgggccgattaaaccgattctttcattctcttcaatatgaaaggagatatggtcgaataatgtcttatctccgtatgttttataaaggttttccgcttttatgatgctcatggttcctatcaatcctcacgtaagttcatgtgttcattttaaatcaggcgctgtaataaaactagtaaaaggacagacaaatttcttggaagagatcattttgtccgaagaatgtttccgcctctccttttatacactggaggggaagaggtgatgacatgatcagcgtcagtttgtgcgttatcgtgaaaaatgaagaggaagtgcttgcgggctgtcttgattccgtcaaagacattgcggatgaaattgtgattgctgatacgggctcgaccgaccggacgaaagaaatcgcggcccgttatacggataagatttatgattttgaatggatcgatcactttgccgccgcccgtaattttgtgttttcgaaagcggaaatggattatattctgtggctggacgccgacgatatgctgacggtaaaggaccgtgaaaagctgattgaactgaaggcgtcgctttcaaaagaggtggacgcggtatccatgtattatcacgtcggctttgatgatcggggagaggtcagcttcagataccgccgcaaccgactcgtcaagcgtgaaaaagggttccgctggatcggagccgtgcatgagtatcttgaggtatacggaaacatcatagaaaccgatattgccgtcacacaccggaaatccgaaaaaaagcactcgcctccctcggaccgcaacttgaagatttatgagagaatggcggaaaacagtgaatcgatgacaccgcgcgatttgttttacttcgcgaatgaattaaaggatcacggccagtatcagcgcgccatcacgtattatcaccattttctttccacaaaacagtgctggatcgaagacgagatcagaacgtgccaatatctatccgattgctacagggcggtcggccatgaagaggccgccatgacgtctctcttaaaatcatttctgatcgattgtccgcggccggagttctgctgcaggctcggcgactattttgcggagaaacggcaataccggcagggcgtgttttggtatgagctcgccctatccgccaaaagcagtgatgcaggctttacccagctcgaatattccacctggtacccccatctgcagctctgcgtctgccactggcagctcggcgacagagaaaaagcgaagattcataacgacaaagccgcctcctatcatccgtcacatccgagtgtcctgtataatcaaaacgtgctcggcacataacatcaaaaaaaagagctgccccgtatgaagggcagctcctttttgattacgctgtcggaattcctccgcttacactgtaaatttgggatgtcacatagcttgattcttctgaggccaaaaagacataaattcctgccagctccgccggctgtccggcacgctttaatggaacggccggtgtttccttgccgaatttcggaatgttttctccgggctgtcctcccgaaatctgcagcggtgtccagatcggccccggcgctaccgagttgactctgattcctttattcgccagctgctttcctaggccgacggtaaaaccgataatggcatgtttcgtcgcagcataatccaacagcatcgggcttggattataaccttctacggacgttgtcgtgataatagacgcgccttccggcagatacggaagcgcggctttgacgagccaatacagcgagaatacgttgacttcaaatgtttgatagatttgttctgtagtaagatcgctgatatcatccactgcctgctgtttgccggcgacaagagcgagcgtgtcaagaccgccaagctcttgatacgctttttccgccaattctccgcaaaacgcttcatcgcttaaatctcccggcagcagaacagcttttcttccctctttttcaattaacgctttcacttcttcggcatccggctgttcctcaggcagatagttaatggccacatccgccccttcccgggcataagcaatcgcggcggcccggccgatacctgaatcgccgccggtgacgagggcttttcttcccttcagcttgccggctcctttatagcttgtttcaccgcagtccggcacaggcttcatctctttctgcaaaccgggcggttcttgatattgttttggaaattcatcatgatcatatttcgtcagcgggttgtgcagatttgcatcagacatacaagactctcctttatcattggtgatgtattcgtatgtgtacccctgagcatgacggatcaaacgtgtaagtgcagtttccgattgataagggaaaacaaaaaaggagcccgtaagctcccttttttatgattctccgagcacgttttcagccattttcgctaaatgctgggcgcttcccgaaatctcctgcatcgtggcagaaatttgttctaccgccgccgcttgaccgtccgtgttctggttgatggattcaattgagtcctccagccctttcagcaggctgtgaatttttttcgtaatctggtcaatttggccgacattgtcttttgaatgagtggcaagcttgcggatctcatccgccaccacggaaaagcccttgccggattctcctgctctcgcggcttcaatggccgcattcaaaccgagcagattgctttgatccgagatgcccttgacagtaacggaaatgtcggcgatttctcccgcgctttcactgacttgtttcgcctgagcggaaatcccggtcatctgtgctgagaaaccgctgatggattctgagatatccgcgatcgccgaagcggtctgttccacgacggcggacaggctttcagcgacatcatgaagcttggctgatttttcaaggctcgtgccgagaccgacgccgccgatgacttttccgttttcatcgtgaagcggaatcgctctggcgatcagcggaaatccgaacagctctttcggcaccatgcttgtcttcttctgattcatgcggatcgcgtctgtaatgatgtcccctttttgcagcggatctcccggctttacattaagagaaaacgttttagccggaatattcacgattaatttttctgtatcataaattccgatggtgatgtcatcttggatcaggctgtttaaaaaaggcgcaactttgacaaaagcgtcaagcaggctgtgcgtttgctgctccgtctgtatactcatttctttcactccttcttaatatgggaattggcgtttttcatgctgaaccgaaatccatttcagcgtggtgaattcttcaaggctccattcgccgttcagcctgccgagacctgattgtttctcgccgccgaacgcaacgttcggttcatcattaatggtcgtatcgttgacgtgaatcatgccggtttcgatccgcttagcaaactcaacgccccgctccacgtttgccgtatgcacggctccgcttaaaccgaacggtgtcgcgtttgcgatgcttaccgcttcatcctccgtttcaaacggcatgatgcagacggccggtccgaacagctcctccttcgcgatgctcatctcaggtttcacatcttttaaaatgacaggctcagcgaccgttccgctgaatcggccggacagcaccggaaccgctccctcttctatcgctttttcgacagaccgtctcaggccttccgcctgtctctcattgattaaaggaccgataaccgtatcagggtccatcggatcgccgactttcagcgatgacactttcgcttcgtagagctctgtaaatttgtcataaacagatgtgtgaacgagcacgcggttcgccgacatacagatctggccttgatgcgtaaaccggctgaatacggccgcattgacggcgtattcaagatcagcatcctcaagcacgatcagcgcgctgtttccgccaagctccaacagcggttttttaaagtgtttgaccgcaagctgtccgatatagctgcccactccggttgagcctgtaaatgagattatccgcggcacgggatgctcaacaaagctgtcgccgatctccccgatatccgtcacgatgacattcagcagcccgtccggtacgccggccgcttcaaaaattttcgcgataagcgttccgccgcagatcggcgtttcttcatgaggcttcagcacgacgccgttccccgcgccgagtgccggcgcaacagatttcatcgaaaggaaaaacgggaaattaaacgggctgatcacccctgcgactccggcaggtattctgtacagcctgttttcttttccgtcaatcgtggacgggagaattttcccttccatccgcaccggaaatgttgcggcttcttttatcatatttttgacaagtccgatttcaaactcagccttcagccgtgttccgccaagctcctccatgattaagtaaataatcgcttcttcgtgctcttcaatgaaagaaacggctttttccaaaatggcccgctttttaaaagggtttactttgtcccattcttgtttcgcaagagccgcggcgcgatatgccgcatccacgtcatcaggcgtcgcttttcggaatgaggtgatgactttttgagtataaggatttctgttttccaatacgttccggctgctcccatccctccatcggccgccgataaactgcttatttagttcttcatattgaaacatgtaaacatctccctttcaccgaaacttgaaattagttgatgagtcatcttttgtatcggtcttaaggtgagaaaattgaactatttcacaataaaattccctttccttccgtgcatcgacgctttttagctttgtccttttaaagtggaaaattctttaattgactgcgagaaatttcgacaatataatacaaacgtcagtgtatataatgataagaatattatgaattttcaggaggacccatatgtctttactatttcggaaaaagccgctggccgacttaaaggcccagagcaaacagaccagcctgtcccgctcgttaagcgcttttgacttggttttgctcggaatcggctgtgttgtcggcacggggatttttgtgattaccgggactgtggccgcgacaggcgcaggaccggctttgattctgtcgtttgtgctcgcgggccttgcctgcgcgctcgccgcgttttgttatgcggaattttcttcatccattccgatttcaggcagcgtatatacgtattcatatgttactctcggggagtgtctcgcgtttttaatcggatgggacttaatgcttgaatatgttatcgcgctcgccgccgtcgcaaccggctggtcatcctatttccagtcgcttcttgcaggattcgggctgcatcttccggaggcgctgaccgccgcacccggcagcaaaacgggtgccgtgttcaacctgccggccgttatcattattttggtcattaccgcgattgtttcaaggggcgtgaaagaaagcacccgctttaacaatgtcattgtattgatgaaaattgcgatcattctgctgtttatcgtcgtcggtttcggctacgtgaaaccggaaaactggtcgccgtttatgccgttcggaatgaaaggcgtcatcacgagcgccgcgaccgttttcttcgcgtatctcggatttgatgccgtgtcaaacgcgtcggaagaagtgaaaaacccgcagaaatcaatgcctgtcggaatcatcggcgcgcttgccatctgcaccgttctttacattacggtatcgctcgtcctgacaggaatgctttcgtacaccaagctgaatgtcggagatccggtatctttcgcgctccaatttgtcggccagaacaaaatagcaggcattatttccgtcggcgcgattatcgggattacaacggtcatgctcgctctgctttacgctcaggtgcgcctaacatttgcgatgagcagagacggccttttgccccgcatgttttccaaggttcacccgcgttttaaaacaccgtttcaaaacacatgggtgacggggatcgctgccgccgggatcgcaggttttattgatctgggaaccttggcgcatctcgtcaatatgggaaccttggcggcctttacagtcattgcgatcgccgtcatcgttttaagaaagaaacatccggagatcaaatcttccttccgtgttcctttcgtgccttttgtgccgatcatcagcgcatgcttatgcctgtatctcgcaagcagcctgccgggcgtgacatggctcgcctttgtcatctggatcgccgccgggatcgtggtatatatgatgtattcgagaaaacacagtttgttaaataaataaaaagggaggctcttttttctgtttgagaaagaagagccttttttgcccttgataattcattcaccttatgaataatatggtgtatgcttcgtttacataaaaaggaggagaatcactttggcaattgccgccccgcttaaagaaaaacctgtccatcgtcccgagacaaccatgtattctattttgttcattatcgggatctgtcatctgctgaacgattcactgcaagcggtgattccggcgatgtttccgattttggaacgttccatgaatcttacatttacgcagctcggaattatcgcctttacgctgaatatggtgtcttccgtgatgcagcccgtcatcggctggtatacggataaacgcccgatgccgtatgctttgccgctcggactcaccgcaagcatgctcggcattttaggtctcgcgttcgccccgtcttttctgacgattttatgctgtgtcttttttatcggccttggctccgccgtctttcatcctgaaggatcgcgtgtcgcttacatggccgccggcgaaaagcgcggattggcgcaatcgatttaccaagtcggagggaataccggccaggcgatggcgcccttgattaccgcgctgattctcgttccgctcggtcaattcggctctgtctggtttacgctagtcgccgcaatcgctgtgctgtttctcatttatatcgccaaatggtataaaggccgccttattcatttgcgcgccgcaagtaaaaaatcaccggccgccgctgtgcagaccgtgattacaaaaccgattattcttgcacttatcatgattatcttcttaattttcgcgcgctcctggtatgtgagcgcgatcggcaacttctatacgttctatgcgatgaatgcctatcatgtcagcattcagcaggcacagagctacatcttcgtctttttatttttcggagctgtcggaacgtttctcggcgggccgcttgcagaccgtttcggaaagcggaacgtcatcatcgtttccatgacggcatcggctcccttgacgattttccttccgtttgcgggacctgtcatcgcctatggcgtactggcgctgatcggcgttgttctgatgtccagcttctccgtgacggttgtctacgcgcaggagcttgttcccggcaaaatcggaacgatgtcagggcttacggtcgggctcgccttcggaatgggcgcgatcggagcggttgcgctcggagctcttattgattcagcgggattgacgccgaccatgacagccgtcgcctttctgcccgttttaggtctgctcgcctttgtcctgccgagcgacaaaacattaaaagaatggcattcataaaaaaatccctgccgaaaaggcagggattttatgtttcaaccgtataaaaatgagtgtcaggaaccgcatatttcggaataaacccgtctctgaaatcaggaaacgctttttgaatttcatcaatccatttttttacgtttttgatgtacgggacgtaaatcatactgactgtcgcctcatcatcaatgtgatagtaccagcagagattgaattcgttctccgtgacgagcgtaaagcctgaaaaatgataaaaaatcagcggggtgtcattgacatatacagccccgtcgcgcaggctgacgtcatattgctcaatattccacagcgccgcattcgcgccgatcgactccgtgacatgcacgtgttcaaactgcgcgggccacttttcaacatacctttggtcaccgtatgtctttttttcttcattcatctccaccgtacaataggagatgcaatcctgtctccactgccagaccgcccgatacgcttccccggtattccgcgcgccgacaaacccggtgttgtactgccccgtcagcttgtaataagacgcaaaccgttctgaattgcggtgatccgtcagaaaaagggaagcatccggcttttccgcaaacagctcgcccgcatctgagaagaaaaagagatcggtgtccaaatgggcaaaatattcggcttcatcatactccgtcatcacatggaacagaaaagccggcttcagcgtccagcaatattcatgaaacgtccggccgccctttgcttcaagcagctccgggtcctccatttcatggagctgaaccgctgtgacatgttcccacggcacctgctgaagcagttcgtacgctttctgatcgacacacagcacatacagatgaaaatcccggcaatgctcatggagagaatgaatcatcggcatcagtttaaagatatgcgttctggaaacaatggttgaaaaatgatatttactcaccatatcacatccaatttatttaagatccacatgcagtaaatcagcagtcagcgctttgaacgcccttgcaaagtgcgtgacgcccagctttttttccgcttttgccaaaagctttccgacctccggcagctggaagctgttcgccgtgatccgcgggcttttcgtcttccagtccggatcgaggttgcggtctttaaccgcgtgcagcagttcgagaaaaatgtgcagcaggctttcatatttctcataatcaagcagcacttcgatgtctgccattatgctgttggttaactccgcgtcaaacgggccgttaaacgcgaggtgcacgtcaagcgaatgaatgtcattgtacttgtcgcacatgtacgcgatattcgccctgatgtcatcaacggaagcgcagttgctcggatgctcctgatggacgctcatgatatcgcgccgcagctgaaatctcattcccgactgatgaagcctgatgccgagatcataatcttcaaagccgtatctgacaatgccttcatcaaacaggccgagatctgccacgtgctgcctcttaactgatgaattgttcgtaatgaaaaaacgccatggcagacggtagccgttcaaatcatctccgtatttttccaaaatgcttttcagcacccggataaagtcggtatctaaatcaaagcatcgttcaagaaagcttccgtctctgatgtcactttcatcaaggagcggctctttatcgcccggcagctcttcatacagttcggcgagtttttccttatgctctttttcaaaacggtcataataaaagctgtaaatccgcttccagaacataccgcatacgacaagatcgtcccggttctcatgagccttgatatgcttcgccaccaaatccttttcggcaagcatgtcgctgtcatggaaaatcaaaatatcgcctctggcattgcggaccgcctgattccggccgtaagcgatccctctgttttctttaattctcacaaaaatcagcggaaaattcgcgctgaatgattcaagcatggataaggttccgtcttccgaaccgttgtcagccacaatcacttcgaacggctctgtgcattcctgttcattcagggacagcaggctgttataaagcctctccttggaattatatgcgggaacaatgacgcttgccttcacttttcgttcacttcctgtatatgatcatttatttgttatcatcctcagatgcaaagccgctgaactcggggcagacggcgctgaccgtcccgatcacccgcttcagaatgtcctgataaagctgatggacaaacggcaggtcggtccggtccgtctcatgaatctgccgaatgtcgccggctgtgacgatccggtatccgctgaaatgatagaaaatcagcggatttccgtcttcgagcacaagacgcccgtccttccatgaaaacgtgtggcggccgtaattccaatggccgatattcacgccgggcgtggtgatgtcacacacgttcgggaacagaccggacatgtaatccaagtagccttgatctccgaattttccttcgcccggcgcatttttgcattcttcaaggcagcgttctttccaccatctgagacaatctgtgccggcactgtcggttttgaagctgagaaaaccggaattataccggcctaaaagacgctgcagcatgtcgatttcctgtttttcaaatgagggaatgacgatatcgccccgtgacagaagcaccgaacaatccggctgattgtcaaaaatcgcgcgcggatcagcgaagaaaaacaaatcggcatcaatgtacgtgacacgctctaattccggatgtccgtccagcacgaattcgagaaataccggcttcaccgtccagcagtattcgctctgatccctcgtccgcttcagttcaaggagctcctcattttccagtgcggacacctgaatcaaggtgacattatccggacgcattgcctgaagcacgtcataggtgtcttgatccatacacaaagtaaaaatgggggcgtccgcctgaaccgctttcaatgagccgaacaaagcgatagcctgatacagccttccttttgataaaactgtgcaatatgcgcttgtcacgtctttctctcacctctgtttctgttacttttgaaaaaaggctttataccattcgatcgttttttctaatccttcatcaatggtatgcgcgggcgtccaattcagaagcttcctcgccttttccgctgataaatattggtgcttgatttcgtggcttccctggttaagcactttcggcttgaggtcactgtccatcgccttaagaattttttctacaagttccagcaccgtcagctgaatctcattgctgaagttgaacgcttctcccgcaagattgagctcctccatcttttccgccagcaaaaggtatgcctcgaccgcatcctcgatgtaaaaataatcacggataaatgtgccgtcgctgcggatttccggcgcttcaccgttcagcacgagctgaatcgtctgcggaataatccggttgaagttcaaatctccgccgccgtacaagttgccgcagcgcgtaatacagaccggaagtccgtacgtattaaaatatgtgtggcttaataaatcggcacagctttttgatacgtcatacggatgtttgccctgaagaggcatgttttcatcgtacggcagtgtcggctggtcgccgtacgctttatcactggacgcgacgatcacccgcttgatgagcggatgcctgcggcacgcttcaaggatgttccatgtgccgagaatattggcttcaaatgtggaaatcggattgcggtttgcgacgccgacgattgcctgagcggctaaatgaaagaccgtgtcaatttcatactcgcccagcgcccgctcaatcacatccagatcttcaagcgcgccctgcacgatattcatttgcttcacttgttctccctgatacaggttcgacttgggcacagtgtcacggacaagtcccgtcacattagccccctgatcgatcagttccttcaccaagcagcttcctaaaagacctgtacatcccgtcacaaacacatttttatttttccagaaactcaaacttgatcaccataccttccatacatgttgtccccggtcccacatcttgttaatttccagcagatttttatacgtatcgatcgccgtccagaaaccgtaatgccggtataccgccaattcgccgtcctttgccagctccttcagcggttcttcttcaaacatgacgtccctgtctttcggcagataatcaaataccttcgggctgagcacgaaaaatccgccgttgatgatgccgtcacttgagtttttttcagaaaagcttttcgccataccgtcttcaaccgtcagcgttccgaattgcgaggtcttttctataccggtgacggttgccgcagccccttttgattgatgatagctgatcagatgaaacaggttgatgttcgccagtccgtccccgtacgtcataagaaaggtttcatcaccgatgatgtccttcgcctgtaaaagccgccccgctgtctgcgtgtgttcccccgtgtctaaaaaagtgattttccacggctcggatgttcccaatatccgcacttctccggtagagctgtccagcgtcatgctgtgattcttccagtcataatctaagaaatattccttaatcatctctcctttgaaaccaagaagcaggataaattcgttcacgccatagtattgatagagtttcataatatgccatagaatcggtttgccgcctatcatggcgagcggtttgggacgttcattggtgatttcgctcattctcgttccttttccgccgcagagaatgactgctttcatctctacccctcttctctgtgaatattggattcgaaaccgcccgtataagagaaaccaacccgataatttgtccgattctctaccaccggtttcaaaatctactgtaagatatgagagattggcgccctttgtgaccaaaagctctctcttttttcagattggtgaagatacacacaaaaaaagagcctcacggaaattccgtaaggctctttctattatttattatcctgattcagcttttctttgccgtaatgatatttagacggatcaaccggcgtaaagtcgctcaatttgtggaatctgagcaggtctttgtacatcacgctgtcagacagcttcagctgctctgtgactctggctttcaggtttttcgtttcctgattgcctttcagttctttccctgtcttcgtatcgtatacgacattggagatggaagtatatttcggcgtgacgtaatctccgttgcggaacgtcaccgtatcatcatggtctttcgagaagagatcggtgccgaaattaatatatttcttagaatcgatgccttccaagtgaaggatcgtcggcacaacgtccatttcaccgccgtacgtatggttcaccccgccttttttgccggggatgcgaagcataagcggcacacgctgattctgcgcgttttgataaggcgtaatttctttgccgagaatttctttcatcgcgcggttatggttttcagagattccgtaatggtctccgtaaagcataatcaccgagttgtcatataaaccggatgacttcagatctttaaagaactgttcaagcgcttcgtcaagataacgcgccgtctggaaatagtcatccacagtcgcgtcgcccgttttcgctttttcgatcgttgcgtctttttcatcaagcgtaaacggataatggttcgtcagcgtgagcaaatgcgcgtagaacggctgtttcagcgactgaagcttcggtatagattctttgaagaacggtttatccttcagtcccatattgacaaggttgtcatcagacatatcgtatgtgctggcgtcaaagaatttatcgtagccgatatgtttgtaaatctggtcacggttccagaatgatttgtagtcaccgtgtaaaacggcgcttgtatagccctcactttggtcaaggatggcaggaagcgattgatacgtgttttccccttttgtcacgaaggctgacccttcaggcagtccgaacagactgttatccatcatcagctcggcgtcagatgttttaccttggcccgtttggtggaaaaagttatcaaagtacgtcatgtcctctccgccgcgggcgagtttattcaggaacggcgtaacttctttcccgtcaagtttgtaattgatcaaaaatgattggaagctctccaggtgaatcttaatgatgttcttgcctttggccttgccgaaatactcggcgttcggcttcgcataatgcgacgatgtatagttttcaacgctcgtcaggtcatcactgctggcatatgcccgctgtgattccgtctgcgccgtctgtacgccgtcataaatcgtgtaattataaaggcctaagtattttacaatgtaattgcggtcaaacgttcttgtcagcagctccgggcggtcctcttcggcaatcgccaggttcacgaagaacaacacaatacccgtcacgataattaatgacgtataccgttttttcagcttgaattccttcagctcacgtctccacaccagaagcgcgattaaaataataatatcaacaaagtataaaatatcatggccggacataatgctgaagatgccgtctcccatatttccgacattaccggattgctttaagttcgggaatgtcaagaaatcatcgaagaatcgatagaataggatattggcatacaaaataaacgtcatgatgaaatcaataatcaccatgataatcgctgatttgcggcctttcgcaaacaatgccagtcctaaaaagaaaatggcgcttgagaacggattgatcacaagcagaaactgctgcgtcggacccttcaccccaaggttgaattcagcatgataggctaaatacgttttggcccaaaacaaaataatagccagtacaaaaaaactaagtctgtaagaaaataatttcttcatggcaacctctactttcctaaacactttaaatctgtattcttactttttgcttcaattcctgctttccgagcaaaacgaaagcatcacacagccccataaacacaccattttaaaaaacgatatatttatcattcgtgtcatgcctattgaacatcttatcccgccagccattagacgcaggatatccgttcttcgtttcacatttttttctggcattaaaaggtaccttatcagacccggtctgaaaataggagataccaaatataagaataacacaaacttctaaaaacgaaaaatgaatatcaaagacagccgcccaacaggcgggctgaagttattgtatgcaaagggactgaaaaacttgaaggttttttttgggtgatgtaaaaaaaggaccggagtcatccagtccttttcatcacatcgctcaaatccccgcccaaacatcttttgcgtaaatgccttttgtctggaggtccaaaagccattcttgcgcttgccgttcgtctgtttcgcggaccgactgatacgctttttgcagcgttgcctctacatcgggcgccattttgctgccgtctccgcatacgtagaggcgccctccccggccgaggatggaaattaaagcgccggcgtctttcgccattaagtgctgcacatacgttttcggtacgccttctttgcgggagaaagccgtatgaagcgtcacgattccgtctttttcataagcttcaagctcgtcacggtaaataaaatcatgatcgtttctgcatccgaaatacagatgagcctcccccagctcttttccttctttttttaacgctgcccgagcctgcagaaatccgcggaacggggcgactcctgtgccgggaccgaccataataatcggtttttccggatcttccggcagccggaatcgtgtttccggagtgcggacaaacatcacgataccatcctcagggcggcggtccgctaaataattcgaagcgactccgcgatactcacccaaaccgctccgggcggggccgcgaacgacgccgacggtaattgaggcctgcccgggatgtttccgaggcgaacttgaaatcgaataataccgcggcttcagcgggcgcaaaagctccagaaatcgctcaaacggaagttcacacgcttcatatttttcaaggagatcgagcatcgagacgcgcgatgttaagatttgctcctgatagacgccctcctcaagaaaatcttccaattcccgtttgtgcggcggacagaccgtataagcggccatttcccggatttgagcccttgatgccgcttcctgcaattcgacacagctgctcagaagatcatgcagcctgaccggccgatcgagcgggagatgagccgcgctctgtccgctggccgtcagcagcacttgatcattcccgttcagattgaaccggcggagaacacggctgacctgctttttgctgtttaccggcagcacgccgagatgatccccttcatgataggcagcctctttcggcagagtgatttcgatatgccttgtgctccggccgctttccggcgcctgaagttccctgttttccgcaacggatgcgtaaaccgcttcatacgtctgtgccaacggagacccgccaagcccgctgacaaattgaaggcccagcgcacttcgctctttttcggcattttcattcagcttaagaccgaatgccttcatggcgtccgtccacatgctttttttccattcatcaagctttccttcaaaatccccgctgacgtccccttcgcctcgggcagaaaagcgttccgccctttttcggcaagcttctcatcaatcagtctcggcacagcctgatatgtcgccgcccagttatgatcaccgcagccgaagacggcatatcggacaccttccagctccccgggtttgacttcttcaagccattgaacgaattgtcccgcgttgctcggaggctttccgttataagaggacgtaatgatcaagagagctccttctttcggcagttttccgatccggtcatttaaaggcgccgtttcagtccggacgccgtgcatcccggcagtatcggcaagttcccgcgccacgccttctgcggttcccgtatctgagccgtacaaaatcagaagcggtcggttatcaagcccgataatggatgcgccttttgtttcccgtttttctttttcgacgtcttccgccgctttttcagccgccgggagagctgccgcaacggctcctttgtttctcggccgcacccggatatgaaagtcgccgggcttaatcgtcagtgtctgtttaatatcgagctcataatcggtgtgatcgataaaggtaaaatgctgcagaatcatccccagaacaagagttgcttcatgcagggcgaactgcataccgatacacgccctctgcccgtttccgaaaggcttatacgcatggtgaggcactagatcaggatgttcaaaccgctccggataaaattcctccgcattgtctccccacgcgtctttatcacggtgaagctggggaattaagacggaaattctgtctttcggcgtgatcggatatttcccgccgatcaccgtatcctctttcgcataaaggctgaacgcaggcgcggtcggccataagcgcaatgactcctgcaaaatcattcggatataactaagctccagtacttgtttataagaaggaacgggatcggtcaaaacccgatcggcttcttcataggctttttccaaaacacggggatgtttcagcagaaaatagatggcaaaggaaagcaggccgctggtcgtttcgtggccggcaattaaaaacgtgatgatttgaaaccggatattttcatcatcaagtttttcgcccgtttccgggtcttccacattcagcattctggccagcagatccttttcatcccgtccgcctgaccggcgctctgcgataatactgtctactaacgaaaacatcgcctgaatgtcatgatgaaattggcgcttcgtcctgatcatgagcttatcctgaacatcaaggcgctgcatttggtgcatcgcttcatcaagggcgcgcaccatgctgttgataaacggatgaggcgtttccctgtaatagctgttaaaccgatagttaaagccgcaaagcccgatcgtatcgagcgtcaggcgggtcatatcagcaggcacatcaacggcctcatccgggttcagcctagcccatttttgaatcagctgcaccgcgatatcagtcatcatcgaatgataatctttcatcgcgcgctggctgaaggtcggcatcagaatattatgcgcctttcgccagttaggctcatgcgtccagcttgtaaacagcccgtcaccggcaaacgcccggactttctccaaagcaccttcaatgcttttatcgaaccgctcttcatcacatacctctttcaccagttcatgtccggacacgacgataatggcgcccgccggggtatgcagctgaaaaataggcccctgctcgtttgccagtttgatcagcgacattgtaggcttgtctttatcaagcaaaggaagattgccgagaggaccgaatgtcttcggctgcggaatcggacctgtttccttcatgaataacaccctttcttacacattgatgcgttccttccaactacagtgcccttttcaccggccaattatccgccgttacggatcaatccccggattgacgattgataacggttttttctatactggagaggcttgttaaatacagaaataaggtgagttcacatatggattttgaaatcaagtttttatcgttttatgtcattcaagtggaaggaaaagacgaacaggcaaacaaacagttcaaacatttccagacccttgacacagacgaatttgaagaaagcgagctgaaggattttcttgacggggaattgaagaaaatcgtcaaacggaaagctgaacggcatccgcaatccgagcaggtccccacaaaaatcggccattttatcacggagccgggccatgagcttgattcaaatccgaattacaaccttttcaaccgcgccagacttgcggatacgaaggaagcatttatcgaggcaagcgaacagttcgtccgtacttatcttgacacgagcgccgtgcgcggcggtgtttttatcgtggcttcggccgttccgcgcaaatattttgaggacaaattcgtctttatgatgaaatgcgatttcgagccgaaggtcgcccgcatctcagacgcctcgtctctcattaaaaaggtcgaaatggccatcacgacaaaaaacatgaaaagcattcaatatccgtatatgccggaagaaggcatgacggaagagcatgagctgaaaatccaccaggcctcgcacgcccgttatttcgaagattttctcaaatttgtcgaatatggcgaatcgatgccggaaatcatgaaaaaccaagtcatgaacatggtgcaggagcacgtgtatgaaacttttgaagaaaacagcgaagagcttcagcagtttgagcacgacattgaaatttgggaagcgagtgaaaagcgggaaattcaggagcgcctcgacacccatcaagtcatcgaggcatccgcgcagatcattgaacacacgccggaagccgagctgaaaatgaaagtcggagaaacagagattaaaggattactggctgatttcggcgaatccatccatctcgcaaaagtgaacgggcgctatgtcgcgctcattgaggcggagacgatctcgtttgaaaaaggcagttcgccggtggagtttcacaagcctgaggggctgcatgaggtgattgagcggatacggaataaatctgaacaagactgacaaaagtccagacgccatgttctggactttctgtatttaataaggctctttgagcaatcgatagcattcaccgatgatgtcttggacgccgggcgttccctttatctcgcggcggacgatttcagatgagagattctgcacctgtaatgcccgctccgcccgtctttcgaagtatgcttgacatgcagtttcatggttttcgtgtttttgcagttcttcactaagcacaatcgcgtcttcaatcgccatcgccgctccctgcgccaatgtcggcgctcctgcatggacggcatccccgcccagaacgacgcggcctctgtgccacggttctttgaccgccatctgctcaatcttatgaaacaaaacgggatattcctttgacatattctctgtcacaaacttcactcccggaattccgcgcagcaagtctctcacccgttcaaaacgcgtgtcctcgtcatccctgaagtcagcgtcatacggccggatgataaatacgtatcctgttttttcagagagcggcacgaccccgacctgcgtctgcccctttttatacatcagtgtcgaatcatgaaaaaccggctcgggaaaagaaatgtaaaatctgtgcgctcccatgccgagatactctgttttcacttccctttgcagcatgtgattgcggacagcggagcggatgccgtcaaagccggcgaggatgtcagccgtcatcgcggttccgtctccacaatgcaccgttatttcatctgccgtttcttcgtaagacacgacttttttaccgggcagaatcgtgacccccgccgcctcagcatgcttgctgaggatatcgtttaatgtttgccgcaatatattattccgccccggcaatgaatcatctaaaaacgcctcactcactttaaactgcagcgttccgttttcatcatgctgcttcagccaatccgtttgaaagccgtgttgacagcattcatcatacacaccgatttcccgaagcacccgaagcgcattttgaggctgaagaatgcccgctccgctttttcgcatgtcggacgccgcctcgcaaagggttacttcaaaacccgctctgccgagagaaatcgctgcggacaggccgccgatccctccgcccgctatgatgatctttttcacttcatggttcatcacgataccgccttctcaatttatttatcatttgttaactattagccaccttactatattggctgaaaaactgtcaatctttataggttgccttttgaatccggcaagcttatactttgaatcactaaaatggtacggaggcttacaaaatggaattgagacatttgccggattactcgcagattgccggacgcgctgagatttacgccgatatggatgctgaatcattgaaaacatttttgacgttatttgatatgtctaaaaaaatgaatcaggtcatggagcattatttctcaagtcacggattgtccgaagggaaattcaaaattttaatgtttctgtttgacgaacccggccacagcctgagtccgacggagctggcgaaaaaatccaatgtcaccaaagcgaccatcaccggattgatcgacggactcgcacgggacggctttgtaaaccgcagccggcataccggtgacagacgaaaaatcagcatcgaacttacaagggaaggaaaagaaaagctgatgctgtttcttcccggccacttctccaacatttcaggagtcatggaaagcttcaccgctggagaaaaagcggaattgacaaaaatgcttgaagttttatttgataagcttctgctgttttccggagacagaacataaagtagtattgtaaaaacaaaggcaaatttctatgagatagaaattgaagtaaaaagatgagggttataaaaaaacagcctgcacattagtttgttcaggctgtttcagaagaaataattttaaaattactttctcttcactataaatgcaggtgttttaatgctggaagttacatttgtatatcgatttttagtcttcaacctcactctcacactatttgatcctttttttaacgatttttgatttgagagtttaaatacttttttaggtgttgagtgactgaaagaacctttctttgtttcattagccacccattttgaaccgttccaaacatcaattgtcatggaataatcaaatgttgcgattgtcccgccccatatgatgctacacaatcaatagaagtagcttttgcagaataagaatccgcatcggtacaaactctcaatacatatgttgcataatctgtactacaaggcataatatccttcccctttcaaattttttgaaacaggtttgttattatgacaaaccctccgttcacttctagctggcaaacgtatgacaaagggaatctcatggcttatgagattaaaaattcaaaactcttaaaattaacaaaaggcgcccctcttagcagggcgcctttttcgcgcgattaatcatcactgtttaaaatcccgaaaaaccgaagcaggttgataaacaagttgataaagtcgatataaagcgtcaatgccatcaaaggaatcaggtcagccgtgatgtcccggtgcttgatctggttcagatcgtataagatgtacattgaaaacacaattgttccgatgacggaatacgccatcatggcggcggaattcagcgggctgaaaatattaaatatccccactgcgagaagcgcgataagagcgacaagcaagaaggaccataaaaacgacaagtcctttttcgttttagcgccgatcgtaccgagcaccgcaaaaatgacaaacgaagaaccgaatgcctccaatacgacataggctccggctgcggacgcataatggctgatgatcggaaacagcgtcattccggaaataaaagcgaatgaaaagacaaacacatatccgacggctttttttcggcgcagccaaaatgcggcgatgatcatgacgacctccaagaccgacagcggcagcatcaatgccggcggaatgaactggcccgtatacaggccgattgtcgcaactaacagtgtaaacacaaataccgtgataatgcgctgcataatagattgtttgctctcataagcagcagtttgcatgtcaaaagtcctcccaaaaaatgatcgtgataggtctattataaataaaatgggagaaatttgcatgattttaagaagattttaaggatgtcaggcctgacgtttcgctgcgcactcctgcatatccatgaaatcatgcagttttttcgtcaatccgccgtgcccgaatcggatatttcccttctgccccggcgttttcacgaaatcaaggaatgccagcacataaagacgcctgacgggaatcggaatgacgcccgcatcataaaaccagccgtcaattgtattgagcacgcctttatttatgccgtattgcttcgtgcaccaatgcagaaagcgcacttcgggcaggtgcagataccggctctcccggaaaggaacagttgaatgcttcatatgtaccgcctcctgtcattggctgttttttaagattgttttacttctttgcttttcagggaaaatcgatatttctccaccttatcaatttgtgtcacttgggaattatgaaccgtaatctgaacagtcccgaaatcgagcgtttccagcgcactgataatcttttcgatcacatgcggatctacgtttcctttggacgtcatcatgctcccctttatgtctggacgttcgtcttttgacaatgagtgttttaatccatactattctgataagaaatatataattatactattatgttttcattcagaaatcaacagcatttacacaattttcggatatgttttctttgcgaaaactttcacttcctttgctttgacataaaccgtgtcgccgacgcccgcccccaaggcgtcatattgctgtttttaagaacgcaatcttcacgttccgacatatttaaattgttttccgctgacaaaaaaagcgccccgcctctggacggagcaccttttttctatgcttttgcttcctcgatcacacatgtgacacccatgctggcgagcgcctgctccagagagccgtaagtttgatactctgaaaaatcaagtcccaattggatagaagtctgtgccacatcaggccgaatgccggaaaacacggttctgatgccgaggagaaataacgttttcgacagcatatacaattgctgcgccaccatcgtatcgacaatgggcacaccggacagatcaattacaaggtttgtgatccgtttggcgacacagttttccggcaccgactccaaaatcacacgcgcccgtctcgtatcaatcgcgccgatgagcggcagagtgccgatcgtatccgcgatcaaaataaccggacagctcaattcggaaataagctcctgctgagatgacagcctcgcgatcattaatttctgaaactgttcagtaaaatccgtcatcagctgatcaaacgagccgttgacaaggtaattccagcggcgggcatcctcatttgttacaatgtcctgatgctcatccataaaacgggtgaccgcctcccaaaagacggttcttgaattgccgatcgcctcaacgacctcatgaacctccgcgtcttgctccactctgcttttcgctacctgagcggcccatttttctttgttatgctgaaaaacggccggatcttccaaaaaagcgcttgcgatgaccgtgtttgtaaaggtatgctgctcgatcagcagccgtttcatttcctcacttaattgatccgcagaataaaaacgccctctcagcttccgtctcagcttgagccatttttccgtcagctctgccgaatgtgtaataatataatcatgaagtaattggtctttgttcactgccgtctcctctttcaagaatatgtacttttgtctaaattataaatcggaatcaccgatcgcactagagaaattaaaaaaacctgcacattaagcttttgattgcttttttcggcaggaggatacactataaaagaaatgaaacaggaggtcagtatgatgatcaaaaaaatcgcgacagtcgccgtatacactgatgatcagcaaaaagcgaaaacattctggacggaaaaagcggggtttgaaaccgtcgccgagcatccgatgggaccgggcgccttctggcttgaggtagcgcccaaaggggccgccactcatttggttatttatccgaaatcgatgatgaaaggcgccgagcatatgaaggcttctatcgtatttgagtgtgaagatgtctttgccgcatatgaacagatgaaaaggaacggcatcacctttttagatgaaccgaaacaaatggaatggggcagcttcgtgcaatttaaagatgaggatggtcatgtctttctcctgaaatcgtaatccgtcaggcatcttaattgactttgagaatcattttcatttaaaatgttggataaaacgtaaaaaggattggagagctgccagatgtttgtgcaaatcagaaacatgaccgtaaaagaaggacatgccgacaaagtaatcgaacgcttcagttcagaaggcgtgattgaaaagcaggaaggtttgatagacgtaacggtcctggaaaaaaaagtccgccgcggtgatgaagaagtcgtcgtgttaatccgctgggagtcagaagaccattggaaacaatgggaaaaaagcgaagaccacatcgcggcccacaaagcaaaccaaggcaagccgaaacctgattatatgcttgggacggatgtcggtatgtatcatgtcagagccgttaaaacaggcgtacacgaaaaataataaagagcatttgccccagggcaatgctctttttattttttctcctcaaacggcaggacaaacagcggtttatcgggcttccattccgcatacagcacgtcctccgtttttttgatgttcagctttttcagctcctgattcagctgcttttcttccagcccggcttctttcagattttcatacagcacttcgccgtcaataatcagcgtgaccggcaaagagacttgcttcggctttatttgcatgtcgccgtttttcgtcgtgtcatattgaaatttcggcaggacgctgaccatcccgtttgtttctaaaattgcgtactccgcttcctgtatagaaaagcaattcgcctgtctgagaaggctttgcaattgattaatgtccagcttattctttttcagcacatcatatttcagttttcctttatgtatgataatactcggctcgccctccaacagctttctggagctttttactttctgcgtaatcagttcgatgagataaattaaaaccccccataacagagaagcaaaaatgatttcaataatcctgacgcctttatcatacaccgcatttccgaccagttcgccgaggatgagcgcggaaataaaatcaaacggcgtaatttgtgagaattgagtttttccaagcaattttaaaatcacaaataaaatacccaagccgcatactaactcccaagccactgtaagtaaatgtcccatattcgcaccttcttcttaaaagtcattaccattatggacattcgcctgttttctatacagcggccggcaatacacaaaaaaacgcagacgaggctgcgttttttcacttctgcttactgtttttgattcgatctgacgacccgtaagcatacctcagcggcataaccggcggccgctccggaacccgtaaacatcgcggcaagccccaagcccatgccttcccagccgccgacaccgaaaatgctgtaaacaaccgtaccgaaagcagtcaggcccagcaccgccaaaagccactcaggccacatctttttcggccatttcttacggagcacagccgatacggcaaagttaagacaaaatgcggccagacagatcagataaaaaaaccccatgtcttttgcacctccgtcatgaggagctttttatttgctcacctttttttcaaacaaatgataacccggcgcgagtccttttgattcgtaacccattccgctgtaaaacgactgaagcgccttgtttccggacacgcagtcgagccggattttcgtttttccaggacaagacaccccgtctccgcccaagtcatgatcgtccggccgagccccgcccctgcaaaccgcctgttaatcgccagccggtggagatatacggactcctcatgtccttcatcgccccatagacgtctgtcccacccgcttgcttcgggaagcagcatgacgacgccggccagctcttcattctgcctgaataaaaaaacataccctttggcgatcgcctcccgcatattgtgggtatcttccccttgcagaaggccgctccactggttcgaccctttatcgcgaagccattctgccgcctgcacgagcagatccatgacttcttcttcatcatccttccgggcggaggtgacccggaatgcccccgccttctcctccgtaatcgtaaatggtgtcataaaatcctcctgtaatcagaatattcgacacctttattatagaccaaacgcagaaaggaaaaaaacagccgtcatgtttgagggccgtttaaaaaattttcttcttatcacgttcttcttttaaaatctcaaccgcttccctgaaacgcatagagtgaacgatttcacgctcacgcagaaaacggagtgaatcattcaggtcaggatcatcggaaatatcaataatccattgatacgtcgctctcgccttttcttcagccgcaatatcctcatataaatcagcaatcggatctcccttcgcctgtatgtaagacgctgtgaacggaacgccggccgcattgtgataaaacagcgcgctgtcatggttgacgtaatgatcactgagccctgcatcacgcagctgctccggtgtcgcatcttttgtcagcttataaatcatcgtcgcaatcatttctaaatgcgcaaactcctccgtgccgatatccgtcagcaggccgatcaccttgtcaggaatcgtgtagcgctggtttaagtaccggagcgctgcggccaattcgccgtccgccccgccgtattgttcaatgagaaacttagccagcatcgggttgcacgtactcactttaaccggatactgcagctttttttcatatacccacatttacagatccctccttatacttgccatggccaaggaccgcggccccagtcccattgagcgccggcctgactcacgccgaattgcagaagcggtccgtactcaggctcaaaccgttttctcagctgccttgagtaccgggaatattcatgaaactgctgaagcgcgagacggtcatggggatgcgtatccagataaagcgtcagctccaccaagacaaagtccgccgcctgaatttgctccagcagccgatagtattcatcatcaatctttttcgccatattcgattcccccccgataaggattatcatagaaatcgtaaagatccttccaaagggtcccttttcttaatgcctccatcggagaaaactgctccaagtgataaggctgaaaccgcatataaagatgcggcggcgttctgtagtattttctcccgatcggcgggcagggatcaaaccggctgtggaagggtttataggatttgaccggtgtaaacggctgattttctttcattacgatcctcctttcctaaacacatgaccttaataggtatgaatccgtatcagcatttatgccctgtaagaaaataaaaaagcccgttaaaaacggactccatgcagctcatctggaatttgaagtaaaaaaatcataatgaaaaatctgattgaaagcactgataatgtttcaatgtatattccgtaatttgctgatcatattcaggatattcgtatctcaataaaacagccactgactttgaatatgctctgaagagaccttggcagtcaaacaatgccttccacacgctttcataagtattgccgacataagtattcagcagaatttcccaatctttcgcattcatgtaatgttgaatatacttataattcttccctacacttaatgaaaactgatgctctatcccaatattccacgcaatcatacgcaaaacattaggccttaaaatgtcattcatatggtccagcgcaaacagtatttctttgcgcattaatcctttaatcacataggttgaaaccatccaaaattcattgcagcaatcatcaaactctccgggggtcggtttctttatatgatattgttcatcactcgcaatcatcttactgttgattcggtcatccttgtctaataatatttccgccaaaccatcactctgtgtaaaataatcctctgtttgactcagagggatcaaagttaagtcgattttatgatgatctttaaaaagcatgagataggagaaccagtctccgagttccggagggaaaagttccatatcttcaggtttttgcatcatcattctttcgccaaactgatccagccagctttcatcagatataaaagagtccatatcggtcacaaaataagaaatatcatagtcttgaaatttgtctcgcggtacatttttattggttcttgatccctctaaagtgacaagacggattctctcgtccttcatcgcaatatcaagaatcaatttcatcatttcgtcttcacttctcacatgtaaaacctcccgataaagagatttttacagatcatgcttttcagtttataaacaacttgctcatgatttacagaaatgtcatatgtacttgatgattttgctccaatcgtaccacagctgcaagaacatgagaagagcactcttgctgttccaagagtgcttttcccgaatggtcagatatattggctgtcccgatgatgatggtgatggaacgggtagccgccgtagcctccgccatagccgccaaaaccgtaccccggatatcctccgaagccgccgtagccgccaaaaccgccgtaaccgccgtaaccgccgtaaccgccgtaaccgccaaaaccgtaccccgggtagccgtagcctccgccgaaaccgtatcccggatatcctccgaagccgccgtagccaccgtagccgccaaaaccgtaccccgggtagcctccgtagccgccatagcctccgccgtaaatcggtcttctttcattcatgatttatcgctccttcacataggttacagtccagtttatgacatgcggaaggaaacgtatgggcatccgcccagttttggcgaaataatcaataattgcttacggagaaatacgatacaggccggccgcataagcaaaataaaaaggccggaacttatgccgccccggcctttttgtctttattcgcctaaatctacattgtgataaacctgctgtacgtcttcgaggtcttccagcacatcgatcagcttttcgaattgagctttcgcatcttccggaagctcgacttcattttgcgcaagcatcgtcagctccgcaaccgtgaactcttcaacgccggcatttttgaatgcctcctgcacggcatggaattgatcaggctcagcatacacgataacactgtcatcctcttctaaaatatcgcgcacgtccacatcagcttccatcagcaattccagcgcttcatccgccgtcttgccttcaacgccgataacggcggtcgcatcaaacatgtaagcgacagacccgctcacacccatatttccgccgtttttcccgaatgcggcgcgcacttcaggcgccgtgcggtttacattattcgttaacgcatcaacgatgatcattgaaccgttcggcccgaaaccttcgtaacgcagctcgtcaaagttctcctccgcgccgcctttcgccttttcaatcgcacgctcaataatatttttcggcacactgtacgtcttcgcgcgctcaagcaccacttttaacgcctggttcgattccggatctggctcgccttgttttgccgccacataaatctcacggccgaacttcgcgtaaatccggctcgtatttgcgtcctttgatgctttcttttctttgatattgttccacttacggcccattttgttccactctctttcacgaattgaatctgtatgataaatactctgcttctattatacctcagcggttgggttgtttcgagtgtaagacattagaaaaaacaggcacgcttaaaatcaccggagcgcagtaagccgaatttgaggattattgtacaaaacataaaaaagcctcccttcatacaggaaggaagtcgcaagtcaaaagattcattttattcttattacctatttcctacactgtatatcctgactcccgtggtaaaattttgatatcgaacaaaagaaaggatatggtcatgaaagttttcgaagcaaccaccctgctggccgctgccaaacagcgcgcgggtgaatacaaaaaactgcgcggtcagatggttaatctgaaaaaagcatttcaaggcgtggctgatctcggtgacggcgatttctctggtcggggcgcagataacatcaaagcctttttccaggaccacgccggcgtcacagacagctggcttgatctgatcgacatgaaaatcgcatttctcacaagccttcccggtaaggtcgaagatgccggactttccaattcgcatgtggaggaatcatttctggagcatgagctcacccacgccctcagtaaatcaaaggcgattatggaagagcagaaaaaggacatgcgctccatcctcggtgagatcgatgacatcatctcgcttgatctgttttcaacggaaagcacagatcagaagctttcttcagctgacaaaaaaagaagcgaaacgatacataagctcggcaagcttgatcacgatctaacgaaagaatacgcagaaaccgaagcgaacgaacagttcatccaagctgacttccagcagcttcaaaatgccacgggcaaaggaaaaagcgccacgccgcttcactacaacgccaaggcgtaccgtgaaagcgacatccataagaaaaaaggcgagattgcaagacattcggatgcttatttgaagatgaagaaagaggaagcgaaggaacgagagattgaaaaactgaaagaaagactgaaaaactacgattatgcgaatgctgatgaattctactcaatggccaaaacaatcggctataaaaacctgacaaaagaacagcagcgctacttcactcaaattgaaaacacgcgtgaacttacagacggtttcaaaggcgttgccgtcggcctttatgattccggaaaagacgcggtcacaggcctgtgggatattgtcacagatccgggcggaacggttgaagccattacaggagcggcggctcacccgatcaagacgtatgaagccatttcagcggcaatcgaagaatcgtaccaaaaagacatggtgaatggcgacacctactcaagagcaagatgggtgtcatatgcagtgggcaccgttgtgacatcagttgtcggcacaaaaggcgtcggcgccgtctcaaaaacaggaacagccgccaaagtgacaaccaaagtcaaaacagcagcacgcaaatccgccgcagcacaaaaagcgataacggtctcaaaacaaaccgttgatcacatcaaacaaaaagtaaacacaggcatagaagtatcaaaaaaacgtgtcaaaaccaagttacatcaaatcggagatctcaccctggctgatattctcccgtatcatccgcgtcacgacgtagtgccggcgggcgttccttacaacgcagtcaacggggtcacacttaaagaaggacttcagaaattcgccaaggtcatcctgccgaaaccgtacggaacctccgcaagcggcagacggacaccggcaccgcatgtaccgccggtaacggtcaaatacggcgagcattttgcgaaatggaccagaaagaaagtattgaagccgaatgtcatctataaaacaaaagaaggctacacgtacaccactgacaactatggtagaattacaagtgtcaaagcagacttgcagctgggagaagcaaaacgcaaccaatatgcgcaatcaaaagcaggtaaaccagaccgtctgacagatgacgacggaggccacctaatcgccacccaattcaaaggctcaggccaattcgacaacatcgtgccgatgaattctcagattaataggagcggcgggaaatggtacaaaatggagcaagattgggcatcggctttgcaagcagaccctccccaaaaagtatcagttgaaattaatgcattgtataaaggtgattcattaagacctactgcttttagggtgaaatataaaattggtgatcaagaagctaaacttatgagaatcaaaaatcaggccggaggttaatatggagacaaaaaaaatggggcaattatatcaaaagatagcagaaagcattaatgagatcattccatctgaatgggaaagagttattctttatgcagaaatacttgacgattcatctgaagttttcttttatttcaatactccacatagtgaagattttatatattctcataatatccctgaacactatcatgtcagtgaggagatttatgaggagctgttatttgacttgcatgacttattcgaggaattacgagatgaatttaaagaaaacaatcaagatatatggactaatctaacacttaatctggggataagcggagaattttcgatagactataattatgaagacgttattcaatctccatataccatctctcaaagacaaacaatctggacttataaaaatgtaggaatttatcctaagagtaaacctttaaaatcctttttagaacagtatttaaattctcaaaattaaaattccccctcctttattggggggtttttttgatacaaatgatccttacaaattaccaattataatgctggaggctgatccttgttggaaaatgaattaaatgcattatatagaaacatagctgaaatcgttaacgaaatgataccagaaccatgggagaaatttttgttctatgctcagattcagagacaggcggaggcacttactttttttacaattctcaaaatgaacctaattattttaagtacagtcttgaaattccgtttgaatttgatattgacgaaaatgaattcgatcagtatgagatggaattatttaaactaagcgaaaaaatgagagatgttttcaaagatcatgatcaagaattattttattctttcactcttagcctagaaagatccggaaaattaactgtcaactttgattatacagattggtttaagacagattatagtttcagtgatcagcttatcatctggaaattcaaatacttaagggaagaacctaaggatccatcattacaaaaattaataaaaaaatatttagatgaatatcctgaaaatccaatttaataaagttgggataatgatgttagaaaaagcttatctaaaaataactgatgtcttaggaaaaataattccttctgaatggagcaaagttgttctgtatgcagaaatactagacggttccagagaagtttattttttctttcaaacacccgaaaacgatgaatatatatactctcatgacataccagaacaatttcaggtcagtaaaaaaatttataccggactactactagacctccaagagttgtttatgcagttacacactgaatttaaagaaaataaccctaaagcatggacaaatttgacactgaatcttgaaagcgatggaacgttctcaattgattatgattatgaagatgttattgaatctgatttggacgaatacgaaagacaaatgatttgggagttcaataacttggggattttccctgaagacgaagaggacaaagaatttgttaaggattatctaaatattaaataatgctatcaacaaaggtagaggatcatcaatggtagctgaaaaaatggaacaactatatcaaaagattgctgaacatctaaatgaaatgattccatctcaatgggaaaagatcgttttatatgctgaaatacttgatgactcagcggatatatacttttattttacaacaccaactaatggtgattacttatattctcattatatacctgaacaatttaaagtaagcgaagagatttacgatcaactgctgattgaacttcaagagctatttgaagaactaaaagaagaatttaaactaggcaaccaagatatttggactaatctcactttaaaattagaaaacaccggaaagttttcaattgattataacgatgaggatgttttattgtctgaacttgatgaccttcaaagacgagatgtttggaaatatcaaaatttagggattttgcctaaagatgaggacgatagaaaattcatagaagagtatctaaacatataataagctttcaaacggctaaaaaaaattaaaaaggattctgatattgtggaaactgaaaaaatgggcgaactatatcaaaaaatcgctgagcaaataaatgaaattatcccctctgagtgggagaaggttgctctttatgccgaaattttagatgattcttcagaagtttacttcttctttagtactccacaaaatcaggaatatatatattcacacgatattcctgaacattttaatgttgatgaagatatatatgacgaacttctatatgaattgcaagattactttgaagagttacgggatcaatttaaaacaaacaacgaggacttatggacaaacctcactttgcatctcgaacgaagcggtaaattcttctcaattgactacgattacaccgatgtcatcgcctcagacttaaacggaacacaacggcaagtggtatgggaatatcaaaacttggggattttgcctgaagatgaggacgataaagaatttgtaataaactacgtcggtctataagtcaataatggctcagcacttccttgctgggctattttttataactacatcataccttatgaatgggcaaaaatatatctttatgcagaagtattagatgactctcccatggttctctttcacttcaagacaccaaaaaaacgtcaactgatttattcgcaagatctaccagcctgatacagtgtaaataaagatatcttcaacacttttcaagagaaatccgagaactttttgaggaattaagaattgagcacaaaaagaataatgataaacaaaacaggcagcatccagtaaacggatgctgcctgttacatcgttatgtatcgtctgaagaagtcatttattttgttttttaaatatgaaaatagatatgacggtaaatatgatggctgtaatgacaatgacccacaagctcgcagccgtactgataaaatggccgtttaacttgtagacgatcccgtaatgcttttcatattcctgtatttggtccgcagaagcatgtttaaacactttatcaactgagtctgtcataaacgcttttctgaacagaacggcggtgtggctgatagggaaatacataataatcttctgcacaaacaccggtacgccgccgatcggtacatatactccgcataaaaaaccgatggctgttccgacaatcgtacttaacgtcgaaaatgcattttgtgtgtgaataaacagcgttaaaaataaatttatggaactcgagagtgcaactgaaagaataatgatccccaatacttcaagtatatctgtaccgcttaaaagcttgctgcctgttgaaacgagaaaaatttcacagcctaaaaaggcgatgaaagaaaagatcaagccgatgacaaatgaatgaatgacatagctcaattggatggtcgcccttgataaaggagctgttaaaaagtcatacgttctcttgctttctttatctttcaccataattccgaaagcgcctaaagtcgttgtcacagctgtaatggacagcaatcccgccaccatccattcgttcaccattgctttggaatcatctgtcgaaccgaccagggccttaatggcgtccagctgtgtctgctgtaagaacacggcatataacagaatgacgataaatactgacagcaaagagagaagcaaaagcgttcgatcacggaagtatatttttatatttctgctgattaaactggataaagacttcatttatgcaatgctcccctttactggcaaactgcttccttgttcttcgataatatggataaacacatcatccatatttcctttaatcacttcgaaagattcaatttttccttcaagacctttcaaaatgtcaaacgcttggagagtggactctacacgaagggaataaatagagtttttaaccgtaaaatccagttgtttattttcaaaccatgccgtcggatcaacgccttgcttaaacatcatatgcagactgtcaaacgcatattgatctttgagctgactcggtgtaccctctgcgatcaggcgtccttctttgatgaccacaacgttatcagccacagcggcctcctccatgtaatgggtcgttaaaaagatcgtcatgtttgtttcttcctgcagccttttaatcgcattccaaacaaatactctcgtttgcggatcaagacctgtagtaggctcatctaaaaataatatagtcggtttatggatgatggcacgggcaatatccgctcttcttctttgtcctcctgacaaatcgctgtattttttctccttaatatcatccaattttaaatagtctgttacaaactgatagttctcttgcacttgtgccttgcttaaatgataatattgtccgcggttcatgatattttcataaacggtcaatcgttcatccaaaatgctctcttggaaaacaactccgatctttttgcggatatgattattctctttcccctcaccaagagtataaccatctattaccacttttccggatgtctttttaatcagcgtacagagaatatcgatagtggtcgatttccctgcaccgttcgttcccagaaatgcaaacagctcgccgcgtttgacagaaaaggatacccctttcactgcttcaaatgatccatattttttgcgcagatcggttactgtaataatgtcttgttcttctcccattctgttcacctcgaaaaataagattctataccgttgttcactaactttatatcgtcattcccgccaggattttctcatttttatccaaatttattatctttttataaataattatcttgattatgaagatatacgtacataaaaaggcttcttaaaagaagccttttatcgctttacgttaatattatgctttcattccccaagtcattaacaatcgccactttgttaagaagctttgtaaggatctcctacacaaatagatttttcttttcctgcaacaacggtagaaatcctagtcgcattcgttaaaaagcctttaacagttgtcgcaaaatcttgcctccctgctttttaaaggtacaagatcatagcgtgattttttcccaattccgttttaataaataattaaaaaaggtttcatttgtgcttatatgtggctttttcttcagcaactgatgaagacttaaagaactcattctctttgtaattcatttgcatatgtttcagccttttaaaaaagtaattttctaattgtttgtctatacaataaataaaacagcctttttgtccccgggtcatcaaagttctgtatgtgttgcgaataatttcgtctgcaagcttctcagcttcttctgaattttgctttagcattttcttcaaaccacgtaaggaggtatctgttttcgcccgctttgaatgatcagtcaatactactccgtccctgcacactagatcatttcctataattacacctacataatcaaattccaaaccttggcatgtgtgtatacaacctatttcattaatagaatcttcatcaattgcccacgtgtctgagttatttaaattccaactcattccgaattgatattcaggaatctcgatatcatgaaattctgttttagctttgccttccttcacccaatcccaacagtaaccagcaactattcgagctttattattaactttattcagatcttctatctgtttacgcaattcatttggatttctatatatacgaaaatcgtagttcattccaatataattagaattcgcagtttcccgaatttgaagaacatcatctaaccagcttatataaccatctgaaccattgcaacgaaactgtgaatccagtttcatatttgtaacctgagcatctaattcttttgagaatttaaggattgtatcagtgctaccaatatcttttaatgttactctttgatgttcgtctatgaaaaaaacagaaagtttggaagcatttattatttccttaatttgattttccccaaggttattaaataaaccggatttctcatttaatcgatgcgcctcatcaacaattaaaacgtcaaattcacctgatggagcattgacataactgcccgatcctttaaataaattatcaatgtgccctttccgaaagttttgttttaacttagtagcatatatatttctgggagctgcattttttgttacatattgtgccacaagacttcggtttgttgcttctactaataaatttatagcaagaacagattttcctgtacctggtccgccttctacaattaatacttttttagtgtttgtacgtaatgcctcattcgccaaatgtaaagccgtctcatacacaactttttgattatcaatcatcataaattctcgattaccttgaagcatactgtttaacgaatcttgaagagactttgaaggccttattcttcctttatctattgtatataggatttctttgttgtctccatacttaatatactttttaatgaaatcacgaagcttacctgaatcacctttgataaaaacaggagcttcttttatataatattcatatattgaatcagttaatggatcgtctgtaccctgattcaagtagttatgtaagtatgcacaaggatatagcttgatatcttctttttgcgcattttcattgtaatcctttattaacgaagcgtatgaccaggcttgataggatgggtgggttgtttcgcgaattcctttatttataaacgttttaacgatggcctctttactatcaattttctctactttctcccattgtttaagttccacaatcacaacagatgaacgatcatccttatctgatccagatataagaaaatcaatacgctttgaagtatggggtattttgaactcaatagcaattcctgcgtccttaggaatttctctatcacttaataccctatacatatactgcatagagttatcccaagatctaacctctttctcattgattttgccaatcttatcattatagtttttacagatattcgtcaccaaattgtcgtcaaacacatcactcagaaactcttcttttgtagcttcatagactatcattgtttcaccttttcattaactttttgcgttatctctataaattcgccgctcaaaataactaaattgagctatattgagaataccatttttcttcaaattaatctgttttaatatgacctttgtacttaataattaaaaaggatccttcacatattaatataaaaagcagcgttctccaaaagagaacactgctttatttcaatactagctttgccacacactccacatgattcgtatgcgggaacatatccaccggctgcacttcgagcgtctgatacccgccatcctcaagcacccgcaggtctcttgcaagcgtgcctggattgcaggacacatacaccacccgcttcggtttcatgtcgatgattgtccgcaggagggcttcgtcgcagccttttcttggcgggtcgacgacgagcgtatcggccgtgatgccttcttcataccatttcggaatgacggtttccgcttctccgactgcgaattccgcgtttgtgatgccgttcagctcagcgttgcgtttcgcatcctcgatggcttccggcacgatttcgacgccgtacacttttttcgcctgcttcgccagaaatagagaaatggtaccgatgccgcagtaggcgtcgatgacggtttcttctccttgcagctctgcgtactcaagcgctttgtcgtagagcacttttgtctgttccgggttgacctgatagaacgatctggcggagatggcgaatttgacgtctccgatgaggtcgtagatgtattcttcgccccagatgacgtttgtttcgtccccaaaaatgacgtttgttttatttgggttgatgttttgcacgatcgatttgacgtgcgggaattgcgccgtaatgtctttgatgatcttcgctttgtgcggaaaatcgcttgttcttgtgatgaagacgatcatcatttcgcccgtgacgacgccgtatctgaccatgatgtggcgaagccagcctttgtggcgttcttcgttataggctttgacaccgtatgctgcacagatgtctttgacggcttggacggcttcatcgtttttggattgctgaatcaggcaggcgctcatgtcgatgatgtcatggcttctttgctgatagaatccggcgacgagtccgccttctctttctcctaccggcacctgcgctttgtttctgtagttccacgggtcttccatgccgagcgtcgggtgcacggtgacgtttgagaggtccagcttgccgatccgttctaagacgtctttgacttgtttctgtttaaacaagagctggccttcataggtcatgtgctgaagctggcagccgccgcattgcttgtagatcgggcacggggcatccgttctgtgcgggctttcttccttcagctcgatcaaacggccgaaagcgaagccttttttgacgcgtgtcactttaatttgcgctttttcctcaggcagggcgttcggcacgaagatcgggaagccctgaacctttgcgacgcccgctccttcatgcgtcaaatcctcaaatgtcacgtcatagtattcatttttttctatcgggggtttcattttcatctataatcacctctcgttttaccaaaagccttgtttcagcgtgctggcaaaccttcaaattcaatgtcagccttcaaaggtttccgatcacgctgaaaagatgacaaaatcctaaaacgaatactgttttaggattttgtccgcgtattagtcatccagctgttccgctttctccttcggcatgatgacgtgaatatgccggtacagattcacgaattcgcccggcagcatgccgccgtattcgccgtccaggttcagctgcatcttttctgatacattgactttcacacggttcgcttttgtgtaaataatgtgctgatcgttaatatgatcgcctctgagcgccatgctcgcgactctgataaactccgcgagattggcttttttcaaaataattaaatcaaacatgccgtcattcaggctggaatcaggggccagcttctcgaatccgccgaccgagttggtcagcgtcactaaaaacagcataatttcgccttgaaacagcttgccgtcatattcaatctcgacttctgtcggtcgaagtgaaggcaacatttccattccctttaaataataagcaagctggccgagcatcgttttcagtttgcttggcacatcgtacgtcagctccgtcagacggcctccgccggcgatgttgataaaatactgaccattcacctgtccgatgtcgatcgggcgggccacgccgttaatgacggtatcagcggcattcagtatattctctctcggaatgcccagcgctctggcgaaatcatttgtcgtgccgaccggaatgatgccgagtgtcgggcgtttgtctaacggcgcaagaccgttgacgacttcattaatcgttccgtctccgccggctgcgacaatcaggtcaaactcccgcaaagcggcttctgttgcggcgtgggtggcatcccccgcgcatgtggtggcatgggtggaggtttcataaccggcttgttcaaatttttgcaggacctgggcaagatttttcttgaaaagctcccgtcctgaagtcggattgtatattatgcgtgcacgtttcattatctcatcatcctacttaagagtatccgatccattattaacactaacaacctttaattatactatgacttgagaaaatcgcaacaatatgtacaggaattgccagaagaaaaaaggccccggctccgtttaaggagccaaggcccgctgtcttactcttcttccgttccaggttttttcttacggaatttcgctaatacttcatatacgatcggcacaatcagaagagtcagcagagtcgaactgattaaaccgccgataacggtgacaccgagtcctttagaaatgacctggcttccgccttcaaagcccaatgccaatggaagcagggcgccgattgtcgcgatcgccgtcatcagaatcggacgcaatctcgtagagccggcttccaggagcgcttctctcgtcgataggccttccgcttctttatggatgacgcggtcaattaagacaatcgcgtttgtgacgacgattccgatcagcatcagcataccgatcatggcattcagactgaccgtctctccggatacatacagtccgactaatgcgccgatgactgtaaacggaagcgagaacagaatcgcaaacggcgctaatgctccgccgaacgtgatcacaagaacgaggtatacgatggcgattgcggcaagcatcgctaacccgagtttcgtaaaggaatctgcaatatccgctgatacaccgccggtatcaatcgatacattgtccggcttatccagtttgtcaactttcttttgaacggctgatgacaccttcgtgacgttgtcagaagtgacggttgccgttacgtcagcgtacactttgccgtcgcgtttggaaatggtatcggatgtcgtgccgtttttcactttcgccacatcgccgattttcacttcttggcctgcaggtgatgtgatggttttatcctctaattcttttacactcttatactggtctttttctgttttgatgttgacgtcaagctctttgccgtcttttttcaccgttgtcaaaggagactgtgacgtttgggacatcagggcttgggagatttgcgaagccgtcaggccctgcttgctgagtttctcctggtcagcgacgaacgtgtactcatcatatgtgctggaaaggcctgagttgacgtctttcagatccttctcctttttcatgatgccttcgatgtctttgaccgtgcctttaatatcagactctgaatctccgtacacatagtacgttaattcgttgttgttgcctgacgaactgaaattttgtgatttccattcgccgcggctcgatgtttttttgatttcttttaagacattgtctttttctttgtcaaaatcaggcgtgtcatcctcgtatttcacgtagaacaatgcgccgtttgagcttccgccgagcggactttgcgatcctaaagaatactgaacagtatcgacatgtttgcgtttaagcagcatatcttccgctttttgcgcagctttttcagcttcgcttttcgtttcgcccggttcaggcgtgtatgtgagctgcatcgttttgtccgcttgcgcaggcaggtagctcgcgccgatcagaggtacgaggaacaaactgccgacaagcatcagaaccgcgatgatagatgtaatccatttatggcttaatgaccaattcagcacttttttatagaaattggccaatctgcccggcttatgctctttcgctttaacaggtgcgcctgtgagcgattttttgaataagctgtgcgcaagcatcggcaccagtgtgatcgaaatcaacagtgatgcggcaagcgcgaagacgattgttaaggcaaacggcataaacagttcgccgatctgtccgccgaccatggcaagcggcaggaatacggcaatggttacgatcgttgatgacatgatcggtttaaacatttcttttgtcgcttcacgcaccaattgcttcccgcgtaaaggttcatctttcagcctcatgcggcggtaaatgttttcgatcacgacaatcgagtcgtcgactacccgtccgatggcgaccgtcatcgcaccgagcgtcattatgttcaatgtgacatcaagctgattcagcacaagaagtgcaatcagcagtgacagcgggatggaaacgatagaaatcatcgttgatttaatatctcttaagaataagagaatgatcacgaccgcaaaaatcgcgccgaaaatcgctttgcttaacatcgtatccactgactctgtaatcggctctgccatatcaagagtcgagctgtacttgaaccctttatggtcttttttgtattgattcagttcatctttaatcgcatcggccacttctaccgtgttggcgtcattggcttttacgatattaattccgatgctgtcctttccgttcgtgcgggaaatggattcagcttttttcacatctttaatgtcggcaatgtcagagagcttgactgtcggcacccctgctgacgcgctttgctgtgcctgctgcatagcctgagcgtccgccgcagatgccgcaccggctccgcccgcttgaccttgagcggcagaagaagatgtgaccggaattctcatctctttcagatctttaattgacgtaatatttccgttaacgacaactgatttttctttgttgccgaatgtgtacaatccaagcggcgtattgacgtcagagccttggatcactttcttgacggtatcttcatcaagtccgtactctttcatttttttatctttgaaagagaattccacctgctcttcctgctgtccggaaacttgtacggacgcaacgccctgaatgccttcaagcttaggaacgagagtgttttccacatttttagtcagatcttcaagcgagcttttgccgcttgtcacactgagcgtcaaaatcgggaaagagttgagactgtaacgggaaatgtcaggttttttcgcgtcatcaggaaggctgacactgtccagcgcttcagcgacttcggttttcgccttgtccatatccttgttgtaatcatattcaatcataaccgatgagacgttttcagaggatgtggacgttacgacgctcactccttctaaattctgcaccgcctgctcgatcggttttgtcacgtcatccgcaacttgactcggagcagctccgggataagtcgtatttactgagaggtaaggcatgttgacgtccggtatggattcctgcttcatattcagaccggcatacagccctgctacagtaacgataatcgtcatcagccaaactgcgaatttgttcttcagtacaaagttaataatgtggttcatcatgtcctccgttaatttttattgactgactggtcattctatataatactaaacggtataactcaacatcgtcaactaataaggcagtaaatttttctaaatttttcaggattaaggggaagcacgtcatgaacgaaaaaaaagagaaaatcataaaaacaggcatccatttatttgccaaaaaagggttttcttcaacaaccattcaggaaatcgccggtgaatgcggaatttcaaaaggggccttctatcttcattttaaatcaaaagaagaccttttgctctcagcatgtgagtattacatcggcatgtctatggaagaaataaagaaaatcaaaacagaacatcagcataaatcgcctaaggacgtattccgaaaacaaatcgcttatcaattccaggaatttatggagcacaaggactttatcattctcttgctgagcgaaaaggtcattcctgaaaatcaaaaggtcaaacagtattttcatgaggccaatattcaatttaacatactgtaccgggatgctttgctctccgtttacagagatgccgtcataccgtttatagcggatgcgtccgttatggcgcaaggaatagtgagctcctatattcatttcttgatttttaatgaacatacggcattccggacggaaaacgtggcggcctttctgattgccagaatcgatgacctgattacgggactgataagagacaatcccgatccgctgctgccgcaggatatcttcactcagccggcggcggacagagaaagactgcttgcggatattcaaaagataaaagcacagcagggctgcctgaggacgtcctcgtatcgcttgaagtcattgaagaggaatacgcaaaggaagagccgcgaaaaccgattattaaaggaatgctgtccaacttggcaggcagcggaaatgagcagattgaaacgctgcgggcttccattgaaacctatttcagcttataaaaaaagagaccggcgcttaccggtctccgtgtcagcagcgcccttagaggcggctgctttttttatcgttttttgatttcttcaagtaagatcttgttgaccatcggcgggttggcctgtccttttgaggctttcataatctgcccgacaaggaagccgatcgcgcggtcttttccgtttttgaagtcttcaattgactgcgggttgctgtcaagcgcatctgttaccagcttcagaagcacgctttcgtcagaaatctgcacgaggcctttttctttaacgattttttctgcgtcgccgcctttttcaattaattctttaaagactttcttcgcgattttggacgagatggttcctttttcaatcagcttaatcatgccggcaaggccttcaggagtcagtgcgacatcctcaagctctttttgttcggcattcaggtaagctgacacttcacccatcagccagtttgatgcctgcttggcttccgcgcctttattgaccgtttcttcgaagaaatcagccatttctttcgtcagcgtcagaaccattgcgtcataggccggcagaccgagctcttcgatataacgcttgcggcgctcgtccggaagctcaggaatggttgctcttacgcgttctttccattcgtcatcaatgtagagctcgacaaggtcaggctcagggaaataacgatagtcgtccgaaccttctttgacacgcatcaaaatggtttttttcgtcgcttcatcgtagcggcgcgtctcctgctgaatgactccgcctgacagaagcacctgctcttggcgtttctcttcatgctcaagtcctttttgcacgaacgcgaaggaattcaggtttttcagctccgtttttgtgccgaatttctcctggccgatcggacggagggaaatgttggcgtcacagcgcagtgaaccttcttccattttacagtcggaaacacctgtgtattggataattgatttcagcttttcgagatatgcgtaagcttcctcaggtgtgcggatatccggctcagatacaatctcgacaagcggcgtgccctggcggttgaagtcaacgagggaatagccgtcgcccgtatgcgtcagttttcccgcatcttcttcaaggtgaagacgggtaatgccgatttttttcgtttttccgccgacttcgatttcaatccagccgttttcgccgatcggcttgtcaaattgagatatttgatatgccttcgggttgtccgggtagaaatagttttttcggtcaaacttcgtatccgttgcgatttcacagttcaaagccattgcggctttcatcgcgaattcgaccgcttctttgttcaaaacgggcagcacgccgggatagccgaggtcgatgacgcttgtttgggtattcgcttccgcgccgaatggcgtcggtgagcttgagaaaattttagattttgtttttaattccacatggacttcaagtccgattaccgtttcaaagttcacttcatttcaccccttacagttcaggtttcgctttatgatgatctgttgcctgctcaaaagcatgagcgacgcggtatacagtgctctcatcgaagtgttttccgatgatttgcagtccgagcggcagtccgtccgcaaatccgcatggcacgctgattcccggcacacccgcgaggttgacagggatcgttaaaatatcgttggcgtacattgtgagcggatcgctggttttttcgccgattttgaatgccggtgtcggcgttgtcggtccgacgatgacatcgtatttctcaaatacgtcttcaaaatcttttttaataagcgtgcgcactttttgcgcttttttgtaatacgcgtcatagtagccggagctgagcgcgaaggtgccgagcatgatgcggcgctttacttcgttgccgaagccttctgagcgtgtctgtttataaaggtcgatcaggttgtccgcattgtctgagcggtagccgtagcggatgccgtcaaagcgcgcaaggtttgcagacgcttcggaagaagaaagcagataatacgttgcaagcgcgtatttgctgtgcggcagagatacttcttcccatgtcgctccgaggtcttcaagcacttttaaagcggctaaaaccgattctttcgcttctttgccgacgccttctccgagatattctttcggcacggcgatttttaagcctttaatatcgccagttaatgaagaaagaaagtccggcacttcgacattggcgctcgtagagtccattttgtccgggcctgaaatcgcctgaagcaggaatgcgttatcttctacgtttcttgtgatcggtccgatctggtcaagtgaagacgcaaaagcgaccaaaccgtaacgtgacacgcgtccgtatgtaggctttaatccgacgacgccgcagaaagaagccggctgacggatggagccgcccgtatcagatccgagtgaaaacggcacttctccggctgcaaccgcagctgcggaaccgccgcttgatccgccgggaaccgtatcgagattccaagggtttttcgtcgctttgtacgcggagttttcagtagaagaacccatcgcgaactcgtccatattcagcttcccgattgtgacggcttcagcggcttgaaggcgttccacaaccgtcgcatcgtaaatcggatcgaagttttcgaggattttgcttgagcatgttgtgcgaagccctttggtcacgatgttgtctttgacgccgatcggcattccgaagagaagaccgtgttcagaccgtccgtcaaccgcttcgtcaagttctttcgcgtaagcgcgggctctttcttcatcaagctgtaaaaacgcctgcaccttatcatccacggatgcgatccgtttgtaagattcatcaacaagatcggaaatcttgatttcttttttatgtatcatttgtttcagttctgtgattttgtgatcaaataatgacatactgtctccctcctttaatccagaatagatggcacacggacatagccgtctttatgatcgggagcatttttcatgacatcctcgaccggaaggcctttacccgcttcatcttctctcattacgtttttcattttcagcacgtgtgttgtcggttccacgttatccgtgtccacttcattaagctcctcggcaaacgagatgatgctgtcaagctgttctgtgaacatttcagcttcttcatccgtaatggcgagtctcgccaaatgagcgacatgctttacttcttctatagaaattcgtgacataagatccacctccgcataattctccgtttcgtcatataatactgatcatatcaaaaacgagccctctaaagcaacaaaacgccgccttctgaggcatgatgaaaccctctctattttatcctaaatcggggagaaagagaaacgaattatatgtcagaaaatttttacttttataatttattggtagcgctttcttctttaagctgttctaggttggcggggattttttccttgagcgggccaggtttcgagagttgattgatcggggatactttgttaggtttagtaaccatagccggcactaaatcatgcgatccccatcgaaagatgactaaaggcaggctggatcgccggcactactaatctacagaggtgatgcaacatttacatgaaagaagagagggtccaaaaacgtgagtattgaattaattatatctcttggcatttactttgccgccatgctgttaatcggctggtacgcattcagaaagacaacgaatattaatgattacatgctgggcggaagaggactcggtccgttcgtaacggcgctgtccgcaggtgcggcggatatgagcgcatggatgctgatgggagttcccggcgcaatgttcgcaacggggttatcgaccttatggctggcgctcggtttgacgatcggcgcgtattcaaattatctgctgcttgctccgaggctgcgcgcttacacggaagttgcggatgatgcgattacgattcccgattttttcgataaacgattccgccactcgtcatcattgctgaaaattgtttccgccgtgattattatgatctttttcacactgtacacatcgtccgggatggtatccggaggcaggttatttgaatcggcattcggcgccgactacaaattcggtttgtttttaacggcgggtgtagttgtgctttatacgctgtttggcggtttcctcgctgtcagtctgactgactttgtacagggagcgatcatgtttgcggcattagtgcttgtgccgatcgttgcttttacccagctcgggagcgtttcaacgacgattgattcgatcaacgccgttaacccgaaactattggatatctttaaaggcgcgagcgtcattagcattatttcttatttggcatggggactcggctattacggccagcctcatatcatcgtacgatttatggcgattaaagaagtgaaagatttaaaacccgcccgcagaatcgggatgagctggatgtttatttcagttgtcggctcattgctgaccgggattatcggggttgcgtattctcatcacttcggggtctccgtaaaagatccggaaacgattttcattattttttctaaaatcttgttccatccgctgattacgggcttcttgctgtccgcgattttagcggcgatcatgagttccatttcctcacagcttctcgtaacggcaagcgccattacggaagatttataccgcgcctttttcagacgggaagcgagcgataaagaattggtcatgaccggacgcctgtcggtattgatcgtggccgttatcgccatcctgctttccatgaatccgaacagcaccattcttgatctggtcggatatgcgtgggctggcttcggttcggctatcggccccgcgctcttgctcagtctgtactggaaacggatgaatgaatggggagcgcttgcggcgatgattaccggggccgcggccgttttaatctggattacgacagggcttgccgcttcaaccggcgtatacgaaatcattccggggttcttcctcagtctgattgccggtattgccgtcagcctgctgaccaaaaaaccggccgatgcttcttatcagctgttcagccggatggaagctcttttgaaaaacaagaaatagacaaaaagccgtcagattttatccctgacggcttttttcttccgcacttgtcctgctataaatactgtgagaaaatcatatcaatttattataagaaaaattgcggaggtgctgtgcaaattgagctggcctatcgaaccagacattttattaaagctgggcattgccacgctgatcggcatgatcatcggtcttgaacgcgaactgaaaaacaaaccgctcggactgaaaacctgtattgtcatcgccgtcagctcctgtatgctgacgatcgtcagcattaatgcagcatatcatttcccgaaatattaccgtatcatgatggatccgctccgccttcccgcccaaatcatttccggcgtcggttttatcggcgcgggcgtgatcctgcgtaaaagcaatgacgtcatatccggcctgacgacatcggctatcatctggggcgcggccgggctgggtctggctacaggcgccggcttttataaagaggcgttcgcaagcctcttgtttatcctgatcagtgtcgaatttcttccgtggctgatcagaaaaatcggtcccaatcgcttgaaggaaaaggatatccgcgtgagaatgtctctttccgataaagacaaaatgaccgagattttaaaggaaatgaaaagcaaacagctccgcattcactccgtccggattgatgacctgggtgaaaaagaatttccgattatggaagtgaaagtcagtgttcataaaaaccgctacaccactgacgtctattatgatattaaagaaattcagggcgtcgtcggagtaaaatgtgatacgttataaaaaacgccgggctggattcagccggcgtttttctatttatacgaatgcagaaaattgatactccgtaatcggtgtttcattttcgatatcgcgcctgaaggctttcagcatcccgagttcctcgtccccgagtgaattgaggtcaaacgcctgatgcaataatccgtagatcagcatatggcgcagccggaggaaatccgggatgtgttcaaaccatgcggaatcaaggtcattttcttccctgtagcctttcataaagtgagtcatgaattcacccgtaaacgcggccttgtcttcatacgggatgaccggataccacaacatgttgtacagcagaatactgatatcattcacaaaccaattgtagccgatatcatcaaaatcaaatgcagtgatttttccgttgtcccaattaaaattgccatgatgcagatcggcgtgcacaaggccgtagttttcaggattcttcggcaaacggcgcagtttttccattagagcatccgcccgctcaaatacgagatgctgatctgcgggcacgtattttctcagcttcagctgctcctcttcatcccattcctgccttttatatgccggatcgctcagacggtagcttttcgtcagccggtgcatgttccccgtgtactttccaagctggtaaaacagagttccgttccagtctgattcctccactttgcgtccgggcgctttttcatagactcttaataaaaacgctccgccttttccgtccggcacttcttcgacatctttgccatttaatgaaggaatcggctttgctactgaaagcccttcctttgccagatgatgaagccattccatttctccgagaatatattccggcgttcttctgatcgtatgcgtaatttttaagatatacggttcgttatctttcacaatttcatatacgtagttctctgcgtccgcaataaattgaaacttggtaaatccgtatatttcaccggcttcagccagcaccttatcttcctcaaaaatcgctttaatatctttatgcatgctgattcacccttttcataacatttgtaggcggtgtgtgtactcagcaaatgtcattcatcaacattcctgcccttcttttttcacagcagattcgtaacatccgcttagaaatgatatgtgttttcctgttaattcctaattatacaaatatcttaacatacctcattcctctctccaacgatattcacactaaaaaacccttgctcatacagaaatgaacaagggcatcttggttaatcgtaaatatggacggtcggttctttgtcacccgcattgcggacgatcagcgcttcctgcccgtcagacgaggtaatgttaatttcgacatcaactgagccttttgaataataatccatcagctcacctgttaagtattgggtgaaggcgatgacttcacttttcccgtaaaattgcatcgggatttcaatcttcatttttctcatttcatcgttttcgtacattgccgttccgacaactccggtgtaattcgggaagtagctgtcgatggcgtttttgaagcgtttaaacacttcggaatcatcagggtatttctttgccgtgtctgtatccgccggatagaagacgtacttttctttgacatcatcccagtttgaaatggtggatgagccggccttgacttctgttttcgcaatgtaattccccggtacgattgatgttttcggcgcttgtttataaagggcgacggtaatcggcacatttttcaggttatccattttccgaaggcggttaacgacttcctgtgcgatttcttcgccgtggctgcggatcgttttgtcgctgagctccacttcctgctgcggatcacctgtgttttcgcggtaatagtatacagagttgagagcgagaccgatcatgacaccgccaagctggatggaatttttatcttttcttactaagtaatcctgctcaagcatggacgctaagtaaatcgggctgttttcgtttttctcttttgctgatcccgagcttggcagcaccgggtttaagccgagattctggaaattggcgtctgcctttttcgcctttttcagatcactgccctcttttttgcggtcaagccagctgagaaccgtgtcctcatctaaatactggccttcctgatacaaatagtcatccgtcgggaacgtgtcttgagcgagccgcatcagcccagtctcgaattcatcgatgtccagcctcgtgttcagccggtccgcggtcaggccgcgcgcttttccggccttaaacgggagcaccattttatagtaggaatcagagatattatatttcggtatgatcgctttttcagaagactttgccgttttctgcgtgatctcttcctctttttttcccccgaaactcggcgaacaggccgacagcatgagtactgccgccgttgccgtcgccgccaatgccaacatctttttcaatagaaaacactcctcttatttctttagctctcccaatagctgtgcttcattccatacttcaatgtttaattcctgcgcttttgtcagcttgcttccggccgcttctccggcaatcagcaagtctgtttttttgctgacagatcccgtcagctttccgccgagcgcttcaatctgcgccttggcttcatttctggacagctcttcaagctttccggttaacacgatggttttgccggcaaaataagagtcgctgtcctctgcttttacttttttcgggcctttgtagagtgtgttcacaccgagttcctcaagttcattcaaaagctcaagcatttcctctttgcggaaataggtgataacggcatcggccatcttttcgccgatttcatctaccgcaagcagctcttcttccgtggcttgtttcagattttccaggctttcaaaatgcatggccagtgttttggccgcttttgagccgataaaacggatgccgagaccgaacagcaggcgttccagcgaattctctttcgacttttggatggagctgatcagattgtcagttgatttttcccccatccgctcaagccggatgacctgttctttcgtcagcttatacaaatcagcgacattacggacgagatgttcacggaaaagctgtgtgatgacacgttctccgagtccgtcaatattcatcgcgttgcgtgagacaaagtgaatcaggccttctctgatctgcgccggacattccggattgatgcagcgcagcgcgacttccccttcaatgcggacaagttcgctttcgcactcagggcagctggtcggcatattgaattctttttcttccccggtccgctgttcaattaagacattgacgacctcagggatgatgtcgcccgcttttttgacgaccactttatcgagaatgcggatatccttctctttaattaaatcttcgttatgaagggatgctcttgagaccgtcgttcccgcgacttttaccggttccagaacggcggtcggcgtaataacgcccgttcttccaacattcagttcgatatcgagcagttttgtcacgacctcttcagccgggaatttgtaagcaatcgcccagcgcgggctttttgccgtatacccgagttcttcctgctggtcgagcgaatcgactttgatgacgattccgtcaatttcataagggagatcggcccgcttcgcctgcagctcttcgatcatttcaatgacttcatctatcgtgtcgcattttttccgttcctggtttgttttaaaaccgagctcatccagaaaatccaggccctgactctgtgtttccacacccatctcgtcaagctccgctatactgtagacgaagatgtcaagatttcgtttcgctgcaattttcggatcgagctgtctgagtgagcccgcagccgcgttccggggattggcgaacggctcctcttcatgtttcagcctttcctcattgagcgcttcaaatgactgtttcggcatgtacgcctctccgcgcacttctatggaaagattacgtttcattttcagcggaatgttgcggatcgtttttaagttttcggtgatatcttcgcccgtcgttccgtctcctcttgtcgcgcctctgacgaaatagccgtcttcataacggagagaaacagcaagaccgtctattttcagctccacattgtaagcgacgccgtcaccgacagcctgacggacgcggcggtcaaaatcgcggagatcatcatcgttaaatgcgttgccgagactgagcatcggcgtgccgtgctgcaccttttgaaaagattcaagcaccgctcccccgacccgctgtgtgggcgaatcaggcgttctgagttccgggtgctcttcctctatggcaatcagctcctgcatcagtctgtcgtactcggaatccggcacgctcggttcatctaaggtgtaatattcataactgtactgatcgatggtgcggcgcaattcttctgcccggtgtttcgctgtttctttgtccatcatgttcttcctttcctcttcaggttactgcttttcaatcggcgcaaaagcggcaagcagacgcttcacgccgactgggctcgggaatgcgatatcaagctcggtgctttcgccttctccttttacgctgacaaccgttccggtgccccattttttatggcccgctttatcgccgaccgcccagctgagcgagtcgccgcctgttttgttcgcataggaaacgggacgggatacgggcccgcgtttcggctgcacttttcttcccggctgcatgcgaggtgttttcttctcatttaggttctccaataaatcgccaggtatttccctgataaagcgggattccggattcatattggtgcggccgaataaggttcgcattttggcattcgttaaatacagttcttcttccgccctcgtaatgcctacatatgcgagcctgcgttcttcttccatctcggcttcttccatcagggagcggctgtgcgggaacacgccttcttccatgcccattaagaacacgactggaaattcaagccccttagcggcgtgcagtgtcattaaagtgacggcatcctttccgcctgcttcttcttccttctggtcgagctggtcaatatccgcgatcagcgccagatcggtcagaaacgcgacgagagacttgtcttcgcttttttgttcgaagtttttcgtcacggaaagaaactcgtcgatattttcaaggcggctttgggcttcgattgatttttcggccttcagcatttctctgtattccgttttttcgagaatttcttccgtgagttccgtaatggacaggtaatcctgcatgttcgtcagattttcaatcatcgcgccaaagccgtcaagcgcgtttgccgctttcgcgctgacaccgatgaaatcaacctgtttgatcgcctggaacattgacattccgttcatcgccgcatatgaagcgattttttctagcgaagtggcgccgacgccacgcttcggcacattgacgatccgcgtaaaactgatgtcgtcgtccgggtttgacacaaggcgcaggtatgcaagaatgtctttaatttctttcctgtcgtagaacttggttccgccgacgatattgtagttcagaccggattttaaaagggtttcctcgatgacgcgcgactgggcgtttgtccggtataaaatcgcgatatcggaaagcttccgccggcccgagctgtgcagctcataaattttgcccgcgacgaattggccttcgccgaattcattgtcgccgctgtaataagaaagcttgatgccttcgtcattttccgtccacaggtttttcggcttgcggtttgagttgtttttgatcacttcgttagccgcctgcagaatccgctttgttgagcggtagttttgctcgagcagaatcacgtttgcgctcgggtaatctttttcaaaggaaaggatattcgcgatatccgccccgcgccatctgtaaatggactggtcggagtcaccgacgacgcagatattttcaagacgggccgcaagctgcttcacaaggaggtattgcgccctgttcgtatcctgatactcgtctacgtgaatgtactggaatttgcgctgataaaactcaagcacttccggcacacgctcaaaaagcttaatcgtcgtcatgattaaatcatcaaaatcgagcgattggtttttcagcagttttttctgataatcggtatacacgtcactcgtgacctgatcgtagtagccgccggccgtttttgcgaattcctcaggttcgatcagctcgtttttggcgctgctgatggagcctaaaatacttctcggatcaaactttttcggatcgatattccgctctttcaaaatccctttaataacggaaagctgatcagccgtatcaagaatggagaagtttcggttgatgccgattctgtcaatatccctgcgcagaatccgcacgcacatgctgtggaaggtggaaatccagatttcatccgcgccgggtccgagaatgctctccacccgctccttcatttctctggcggctttatttgtaaaggtaatcgccagaatgttccatggcgccacgtgtttttccgccattaagtatgcgattctgtgcgtcagcacacgtgtttttccgcttcccgcgcccgccatcagaagcagcggaccgtccgtcgtcttgaccgcttcctgctgaacgggatttaatccgcttaataattgattgctaatgtaattcatatccgttcaccgcctatcaaacatatgttctatcataaatcaatttcgtccgcttggctactttgtctttacagccgccaccgttttgagcgcctgatcaaaatcttcatatacggcatttccgacaacgatgacatcggcatgacggccgaaccgttccgccgtttccgcgtctttaatgccgcctccgtaaaacaggacggacttgtccagcacagccttcgttttctccaccgtttctatgtccgccagcatcccgctgtattccagataaaaaatcgggagatgaagcaaatgttccgcgacccgcgcataggcgagaatatcttctgtttctatatgtgtatccgcctccgtcaaagcggccgccttacaatcagggttgacgatgcagtagccctccgtcacgatttcctccattgacatgagctctccgtattctttcatcgcctgatgatgcatgccgacaatccagtccgcctttttgctgttgagcacactcggaatgaaataaagatcaaacccgggcacaatggaatcaatcgtcgacacctcaagtacgcacggcactaaaaaccgccgcacctttgacatcagtctcagcacattgtcctcggtgatattgtcgcttcctccgatcacaatggcgtcagtccctgattcacaaagccgttccagctgttcatccggtaaatctttattcggatcgagtttaaaaacatgcttccactcgttaacatcgtacatgcgttttcgttcctccattcgtttcttgccatttaaacattataacaaattcgtttggcccggaaaaacggaaaaagacgtcattcacctgattcacaaaaaaagattgcgctccgccggacgggaaacggctatgtttgaaaacagacaaaatgtggaatgtcaaagagaaaaaaggcaaggagtctgatctcaatggaacaagccattatcgtactgatttgtatattgatttttattattttagttcccgccgcattgtttctctggatttacataagagacgaaaagcaggaagaacattcagtgctgcgcaattatcccgcagcgggaaaactgcgctatatatttgaaaaaatcggacctgagctgcggcagtatttattcagcaatgataacgaagaacagccgttttcccggagagaatatgaacagacggtcatgtcgggaaagtataaaagcagaatgatgggcttcggctcagaacgggatttcgatcagccgggctattatatccgtaacgccctcttcccgaaacaaagggaggagctgcgcacagatcagacgccgaagatcgacacgatggtatacaagattgacaaagacaacctgctgaaacgcagcgaacaccgcgaaaaagcaaaagcggacccttattacctgcatccggacgatgtgcaagtgatcggccgcgacacatgcaagaaaccgttttatgtaaaagggttaatcggacaatcagcgatgagctacggctcacttggcgaccgggcaatcaccgccctgtcaaaagggctgcaccaggccggcggcacatggatgaatacaggcgaaggcggcctgtctgagtatcacttgaaaggcggcgcggatattatctgccaaatcggccccgggctgttcggcgtgcgcactgaagatggagaattttcatgggaagaatttaagaaaaaaagccgcctcgagcagattaaagcctttgaattaaagcttgcgcaaggggcgaaagctagaggcggtcatattgacggttcaaaggtgaccgaagaaattgccgccatcagaaatgtgcagcccggacaatccattgacagtccaaaccgcttcaacgagttctcaaatgttccggacatgcttgatttcattgagaaattaagaactgtcggtgaaaaaccggtcggcatcaaaattgtcccgggcagccgcaaagaccttgaagaccttatttcctgtatgagttcatcaggcaaacttcccgactttattacgattgacggcagtgaagggggaacgggagcttctttccatgagctggcggattccgtcggcctgccgattctgaccggcctccccttgttgacggccttttgaagacatacggtataagagataggctgaaaattttcgcatccggaaagctgctcactcccgataagattgccgttgccctcgcgttaggcgcggattttgtcaatattgcccggggaatgatgttttcagtcggctgtatccgcgctcaagtatgccacaccaatcattgtcctgtcggagtggcgacaaccgatccaaaacttcagcgcgcgctcagtatcgaggataaacagcatcgcgtctgcaactacgtgctctcgttgcgtgaagggctgtttcatcttgccgcggcggcgggtatcagctcgccgattcatttctcagctgaacacatcgtataccgggaggaagacggaagcctgagggaacttcccggccttttgaatcagcacgcataaaaaaaccgcctgccgtcatcggcagagcggttttttacgtagctgaggaggattctcctttgtttacgcggtcaagcgccatttcataggcgtcgttcccgtaatttaagcagcgcttcacccgggaaatcgtcgctgtggaagcacccgtttcgctttcaattttgtgatacgtatttccttcgcggagcattctcgccacttccaaacgctgcgccagcgattggatttcattaatcgtacaaagatcgtcaaagaaacgatagcattcctccagatctttcagcgataaaatagataaaaataactggtccagttcttttccgcgtaatttatcgatttgcatcgtcaaacaccttctcctttactaatggaagctgcatcgagatcaggcacgatattaatccatgtctttcctggcacaaacggaagaatctcaccgccttttacgggcagaatacggccgtctttatattcccagtctgactccataacatcgccgtgctgaagcaggaggcccttcccccctgactgaatatcgatggcccgccttccatctttgtctgtcatgcgatggccggcttcaacaataaaaatgttgtgcatggctaaaggctttccggtctcccggtctgtcgctttcacaccatcagagcttcttgtataagcatcagcttttttatcataatcgtattcgacaagatttgtaacgttttgtgttccataatctatccgaatattgtaggtttcgtttccgggttttgcatctgatgtctgaaatgggagcggttctgtttttccgttcagcttgtatcctttttgttccgccgccttcctgatattgtcatacgacgtgtaggaattgtggggcggcttgctgaaatcggctctccaaaacaggctgccgtcaaaatccaaaccgtttatataatcgtaagttccggactccagctgctttttagcgccgggactccagccatgatggacaaatatgctgttaaacccgctgctgagcgtgacaaaatattccctcgcgctccgcacaggcccgaccgtttccggcatctcactttgaaaaatcgcgagaaaccgcgtaatccggccctccgcgagcgcttcgatgacaacatccgcctttgacagcccggattggggcctcgccttcggatgattgttcactgcgactgcaatcggacggcgttctgcaagcttctgctcagttttcagccccgttaaaggagcttccgcttctttcggctgcacctgatcggcattgttctgccggcaggcggcaagcagcaaaaacgcaaaacaaagcatacaaacggttttccatcttttcatatgtcggctccctgcttttatattttaacgcattatcgatggaaagagtacagtttttttcatcacgtcgaatattcctctcggcgtaatgcggatataaggcaggtgtgtgctctgcaaaaagagcagcgtatagatcggatcgcagaatcggtagccccgctcctccagcagcgtcctcagtttttgctctttctcaagcacttcttcataattctccgcggatgcagaaccgtttaaagcgaggggaatctcatgaagaaccttcccgttttcggcaagcacgattccgccgccgatttctttcatccgtgagaaagcgagcaggatatcttctttattttttccggcagcgataatatctccggttgtcgtgtaggaactgacaaagccctgcacccgatcggcaaaacctttcagcattgtattgacccgccattttccatgcttatcgagaagcgtgagatagcattcatcatgatcaaaagaaagctggtcaacagaattatcaatcgcaatcatatacggctccataatgacggcgttgcgcattatcacacccatcggcattgaaaactgtaaatcatccatcgtcatatcatatgaaagctcaagagggacaagaccgccctttttccaatccgtttctgtaaacgcattcatatttcggccgtcttccctcagcaggatgcctttggagatcaccgtgaccgggtccggattcatcgggtcatcgagaatgttcaatgaagcaagccggcccggaccgatcacaccgagaaagtcatccatctgataatatttcgcgatattaaaggaggccatattgtaggcgtcaatcgccggaaccccttcctccaaagcgattttgattaattcattcgtcatgccgcctttataaaaatgcggcgtcgctccatccgtcgtgtaaaagaaatgatcataatgccggaagcctttttgatggagatcctgcaaaatcgttctcaaatcagggcggatggatgaatgtctgagcgaaacatagtaacccaattcaagccgtctcatcacctcgtcgccattcatcgcctcgtggtcagaatcagccccgaacagtttcatcttcgtcagtgttttttcagaagctccgggaaaatgcccttctatccgcttgcgcagtttctttgtcgcctgcatgcaatgaagcatcaagtcatcgccgtccatgaggcgcggccatccggtcaattctccgccttgaatgacatccggatgctcaatccattgcttgcggacatcaaaagaaaggagctggtcctcattcagcacttcagtctgcagatcatatctggaccaccagaaatattgcaccggctgtttttttagttcttccaatatagtaagcgctttctttttaccgctgtgcaaaagaaaaaacaagttatcattaacaaacgtcgttgttccgaattgagacacatattcggcgagcgtttggggattatatatttgaaaaggatgtgtatgcggttcaatgtaacctggcacaatgtattttccttcacaatttatggtatgaatgtgctctgctgcatcaggaagctcatgaccaacatatacaattcggtctccgtaaatccagacgttctttttcagccattgttttaaaaaaggatttaatacgagagcatcccgtaaaagtagcgttggaagcagctttgagtctacaacatccgcctgtgatctgatgtctttatttttccagttaaaggtacgttcggacattcacatactctccttcgcttatattagacccatcgtatcacatccgcacaattatcgcacggctaaaacgttacaaattattgaagatgaatgaaaaactttttctaagggagctgaaatgatgaaaccgaatatcagtttattaaacgccgttatgcgcatcacttgcggcctcaccattttgtctgccgcttcagcaaaatacacgagaaaaccttggtgcaagatgcatctcttctgtatgatgatgggcgcgatgaaagcggcgtccggcatcctccgcttctgtccggtgacatatatgttccaagccggaatgaatcaggatgacagccatcagcaagaaaaataacaagccgtttcggcttgttatttttttctcctgtcccgcgagtatgagaagaatctgccggcgatcccggcatcacaaaagccgggacagaattcaagactgcatgacaatcttagtcgtcattcagaagaaaacccgcatcttttaagacgcgggggtttcctctttatcgctgcgatgctttcagcgcacgggcgccgatatcgcttctgtaaaacagtccgggttttgtcagccccgaaacggcgctgtacactttatccctcgccgcttcaaatgtctcagcaaatgccgtgacattggcgacccggccgccgttcgtaacaaattgtccgccgtcttttttcgttccggcatgaaaaacggcgatcccgtcttcagcggacgtcaaactgccgatcggcgtccctttcgcatagccttccggatagccttcagaagccaggacaacgctgaccgcggccgtatccttccatcttaggtcaacatctttctcatgcagaagatctaagagcacctgaatgaggtccgattccattctcggcacgacggcctgtgtttccggatctccgaagcgcgcgttgaattcaatgacctttgatccgtcttccgtcagaatcagccccgcgtacagcacgcccgtgaaggagcgcccctctttcaccattgcttttgccgccggcttcacaatcgtttcgactgcgcttctgacgatatcatcggaaatgtgcggcaccggtgagtaggctcccattccgcccgtattcggccctttgtctccatcgaaggcgcgtttatgatcttgagcgatgaccatcggatagacggtctccccttttacaaacgccattaaagaaaattcttcgccggcgagaaactcttcaatgacaacagatgcgctcgcctccccgaatttctcatcctcaagaaaatcgtgcaggcattcaatcgcttcttcttccgtcatcgcgactgtgacaccttttccggcggcaagcccgtccgctttaatgacaatcggcgcgcctttttgctgtacatatgctttcgcctcttcaaatgaagtaaacgtctcgtactccgccgtcggaatgccgtattttttcattaaatccttggcaaactgtttgcttccttcaataatagccgctttttcagacggtccgaaaacaagcagtccggctttttcaaactcgtcggctatcccttcaatcagaggaacttcggggccgataatcgtcaggccgacatgatgttctttcgcaaacgcaatgagtgcggcatgatcgctttctccaatgttgaccagcgtcgcgcagtctgtcataccgtcatttccgggcgcggcgtacaccgtgtcaacaagcgggctttgcgccgctttccaagccaatgtatgctctctgccgccttttccgataatcaatacattcacgcttcgttccccccttaatgtttgaaatgtctgatgccggtgaataccatggcgattccgtattcatccgctttcttaatcgaatcttcatcgcggaccgatccgccgggctggataatcgccgtgacaccggcttttgcggcttcttcgactgtatccggcatcgggaaaaacgcgtctgatccgagcgcgctgccttttgctttttctccggcctgctcaatggcgattttggctgaaccgacgcgattcatctgtcctgcgcccacaccgaccgtcatatggtcttttgcaaggacgatcgcgttggatttcacatgtttgacgactttccaggccagcttcaaatcttcccattcctgctcgctcggctctctttttgtcgggatggtgatgtcggcgtcatcaaatccatggacgtctaaatcttgaatcaaaagaccgccctgtacggaagtcagctgtttttctttctttcctgatgcggtcacgtcaagcgtgagcagacgaaggtttttcttcgccgtcagcacgttcagcgcttcttcactgaaagaaggggcgataatgatttctaaaaagatgccgtgaagggcttcagccgttgcctgatcaacttcacggttcagcgcgatgatgccgccgaaaatggaggttttatcagcttcatacgctttattgaatgcttcctcaattgaagctcccgtaccgactccgcatggattcatatgtttaacggcaacagctgcgggttctgtaaattcccggacgatttgaacagccgcatccgcgtccttaatattgttataagaaagctctttgccgtgaagctgttttgccgctgcgatggaaccggagacaggaagtgcgctttggtagaaaaccgcctcttggtgagggttttcaccgtagcggagcgactgttttttctcaaaagtaacagtgaattgctcagggtctttctcaccggcctcgcgtgttaagtaatcagcgattaatgcgtcgtatgccgcggtatggcggaatactttggccgcaagctcgcgttttcttttgagcgaaacgccgccgtgttctttcatctcattgagcacggagctgtaatcggccggatctgtgatgaccgtcacatcctgatggtttttcgatgcggcgcgcagcatgccgggaccgccgatatcaatgttttctatcgcttcatcgtatgttacgtcttcttttgaaatcgtttctttaaacggataaaggttgacgaccacaaggtcaatcggtgcaatgccgtgttcattgatctgcgccatatgctctttattgtctcttacggcaagcagaccgccgtgaatattaggatggagtgtttttaaccgtccgtccataatttcaggaaatccggtcacttctgaaatgccgatgacatccacaccgttttcctgaagaagtttttttgttcctccggtcgaaatgacttcgacgccgagctctgtcagttcctttacgaaaggtacgagatttgttttatcagaaacactgattagtgcgcgtttgattgtcatgccttttcacctctgttatttagtcccagcagccgtttcacaacgctcggataccatttgtgctcaagctcgtgtattgtatgctctatgtcttcaagcgtatcgttttcctgtatttcgaatgctttttgcgcgataatcggtccggtgtccatgccttcgtcgacgtaatgaacggtaatgcccgccactttcacaccggcccgatacgcctgtccgacagcgtcaatcccagggaatgccggaagaagcgagggatgtatattaataatgcgtcctccgtatgcttcaagcagcgtatctccaatcagtctcatatagccggcgagaacgattaattccgccccgtgcaggcgcagctgttcaataatggcccgttcaaaggccgctttgttttcaaaagatgacggttcaaaggcgaatgacgggatatgtaaagcctccgccctttccgccgcctttgcctgaggcttatccgtcacgagaagcgagagctccgcatcccacttctcttctctcatgcgtttggcaatggcctcgaagttcgatccgtttcctgaagcaaataccgcaaactttttcatgaaagagccgcaccgccgaaagaaatgccttcgccccgcttgacccggccgatcagataagccttctcgccctgagcttcaagcgtgccgatgacgtctgtcaggttttcttctttaacggcaaggacaaaaccgatgcccatattaaagacattgaacatttcttcttctttcagcttgccgtgctcctgcagaaacggaaaaatcggcgggatcggccatgatccgtgatcaatttccgcgctcaatccgtccggcagcatccgcgggatattctcgatgaatcctccgcctgtcacatgcgccatgccgtccaccttaccgcttttcaccgccttgagcaccggcttcacatatattctcgtcggttccagcaattcttcgccgagaggacgcgcaaacggttcatagacagtatccaaatcaagtccgccgtcatcaagaagcacttttctcaccagggaaaatccgttgctgtgaaggccgcttgaagtaagtccgattaagagatgcccctcttcgatatgttcaccggtgacgatttcgtctttttccgcgacgccgactgaaaagcccgcaatatcgtattcatcagacgtatacagccccggcatttccgccgtctcaccgccgataagcgctgatcctgactgctcgcatccgtccgccacaccctgaacgatctgctcaattttcaccggatcagccttgccgaccgccaaataatcaaggaaaaacagcggctccgctccctgggcaagcacatcgtttacacacatcgcgaccgcatcgacgccgatcgtgtcatgcttatccattgaaaatgcgagtttcagtttggtgccgacaccgtctgttccggaaattaaaacaggcttttgatacggaagctctgacagatcaaacattccgccaaaaccgcccaggcttcccataacgccgagccttttcgtgcgctccacgtgttttttcattcgtttgacggcttcgtatccggcttcgatgtcaactccggcatttttataagcatcagacatccctatcactccttgtcaattcgtttctcctaaaaaggcagaaagagaaaggcagcctgaattcccgctgcctttatgtcattttcacattttattttgtcagcaccgcttcttttacgtgaggaagcactgtatcctgataaatttccgtcggatatttgcccgtaaaacaagcgaggcattgtccgcaattggtgtcttcaaattttcggccgactccttttaacaatccgtctacacttaagaaagaaagcgtgtcggcaccgatgatctgacggatttcttccacggaatgagaagaagcgatcagctcctcatgggttgatgtgtcgataccgtagaagcacggatgagcgatcggcggtgaactgatcttgacgtgcacctctgtcgcccccgcttctctgagcattgtgacaatccggcggcttgtcgtcccgcgcacgatggaatcatcaaccatgacgacccgttttccttcgacaacaccgcggacggcggacagcttcattctgacgccttgctcacggagagcctgtgacggctggataaacgttctgccgacataacggtttttaatgagaccgagttcatacgggatgcccgtcgcctcggcatagccgatggccgcagaaatactggaatcaggcacgcctgtgacgacatccgcttcaaccgcggactcccgggcaagcattttcccgaggtttttccgggcgctgtgcacgttaatgccgtcgatattgctgtcaggtcttgagaaataaatgtactccatgctgcagatggaacggttgatattcatggaaaaacgctctgatttcaagccttcatcgttgatgatcagcatttcgcccggctctacctcacgaaggtacgttgcgccgacaacatcaaatgcgcacgtttctgaagcgaccacataagcatcgcccatgatgccgattgacagcggtctgagtccgttcgggtcaagcgctacgatcatctctgtttcagtcatgattaaaaaggcataagcgcctttcagcatagatagcgaatttttgatttgatccttcagcgaaaagtgtccgctgcgtttaatcagatgagccagcacttccgtatcggaggaagtctgaaaaatgctcccttggttttcaagctgctgcttcagctgtgtggcgttgaccaggtttccgttatgggcgagcgcgaggctgccgttgttttgcgaacggaacaggagcggctgaacattttcatatccgcctcctccagccgttgcgtaacgaacatgcccgatcgcgccttttccctttactttgctgagctcgccgttttgaaatacttcagtgatcagcccttggcctttgtgcgccgtcagtttttcgccgtcagtcgcgacaattcccgcgccttcctgtcctctgtgctggaggctgtggagaccgtaatacgtaatttgcggggcttcttcatgtccccagatgccaaacacaccgcattcttcattcaggcctttgatttcagcaagcatggaatagctcctttccacgcgcgctcaagttctttcgtttgcgcgtgaaccaattgttgtccgtcctggttttgaatcgccagaagtccgtcagccgttacctcaccgatatgaaccgcatcagccgcagccgcttcaaacgccgcttggtgttcttttttgaccgaaacgacgaagcgggattgagattcagagaataataatgccgcttccccttcaacagtcacgttggcgccaaggttttccgtcgtcatgacactttctgcaatcgctacgcctaagccgccttcagatacgtcatgcgcggattgaacgaagccttttttaatcgcgtcaagcaatgctttttggcgtgacagctctatatcaagatcgatttgcggcgctttgccgtaaatgcggccttctgtcattttttgcagttcgcttccggcaaactcaggttttgtttcgccgatcacgtatacaagatcccccgcttgtttgaaatgctgtgtcgtaatatgagcggtatcttcaattaagccgaccatgccgataacaggcgtcgggtagatagccgttccgttcgattcattataaagtgatacgttaccgccgatgacgggtgtgctgagaacattgcacgcctcgctgatgccgtcggccgctttttcgatctgccagaaaatttcaggtttttccgggtttccgaaattcagattatccgtgaccgcaagcggttcggcgccggagcatacgatgttgcgcgccgcttcggcaacggcgatttttccgccttcttctggatcaagatataaataacgggcgttgcaatccgtcgtcatcgccagcgcttttttcgtgccgcggattctgagcactcccgcgtcagagcccggagcgaccaccgtatttgtgcgcaccatgtagtcatattgatcatacacccactctttgctggcaattgtcggctgctgcagcagggcaaaaagcgtctctgtcccatcttttacttcaggcgcgggaacttctgtttcctgaaactcgcggtagtacgcgggttctgctgacggtttgtggtatacaggcgcttcttccgccagtgcgtcgaccggaagttcgcaaacaacctctccgttatggcggaggcggagcattttatcatccgtcacatgacctacggaaaccgcttcaaggtcatatttatcaaaaatatcgacaatttcctgttcacgtccgcgttcaatgacgagaagcatgcgttcctgagactcggaaagcatcatttcgtaagcggtcatacccgtttcccgctgcggaatgagatcaaggttcatttcaatgccggagccggctttgcttgccatttcagcactcgaacttgtcagaccggccgcccccatatcctgaatgccgactaaggcgtcgcattggatgacttcaaggcatgcttccaggagaagtttttccatgaaaggatcgccgacctgcaccgcggaacgtttttcttcagatgaatctgacatttcttctgatgcgaaagtagcgccgtgtatgccgtcgcggcccgttttagcgccgacgtacatgaccgtgttgccgacacctttcgcctggccttttttaatatctttatgatcaatcaagccgacgcacattgcattgacaagcggattgccctcatagcttgcgtcaaactgcacttctccgccgaccgtcgggatgccgatacagtttccgtatcccgcgattcccgccactacttcttcaaacaagtacttcacacgaggtgaagtgagttcaccaaatcgaagagagtttaatacagctatcggacgggcgcccattgagaaaacgtcacggataatgccgcccactcccgtcgcagcaccttggtatggctcaagcgctgacgggtggttatgagattcaattttgaacacgaccgcctgattgtcaccgatgtcaacgattcccgcgccttctccgggaccctgcagcacgcgttcgccgctagtcgggaatttgcgtaaaaccggttttgagtttttatagctgcagtgctctgaccacatcacggaaaaaatcccgatttccgtgtagttcggcaatcttccgataatagattcaatgagtgcgaactcgtcatcactgacacccatttgctgatagagtttctcttcttttatttgttctttacttggttcaagcagtagcgacatgagtttccctccaatttttcacgatagaccggaacaatgtaagaccgtctgcgctgccgagcagttcatcgactgcgcgctcagggtgaggcatcatgcctaatacgttgcctttctcattcacgacgccggcaatgccgctgacgcttccgttaatatcgccgccgtatgtgaagacgatttgattgttttcttttaatctttcaagcgtttcgtcatcacagtagaaattgccttcgccgtgggcaaccggaatcgtaatcgattgtcctttttcataggaagatgtgaataacgtatcgccgttctgtacgattaattcaaccgggcggcagatgaactttaaatctttgttgcgtctcatggcgccgggcagaagtccgagctcctgcagaatctggaatccgttgcagacgccgagaaccggttttccttcggcagccgcttttttcacggccggcatgatgtttgcgaatctggcgatggcgccgcatctcaagtagtcgccgtatgaaaacccgccggggatgagcacgccgtcaaatccgtcaaggcttgtttcctcgtgccagacatactcgacttcttcgccgagttcgtcctttacggcgtgaaacatatcaatatcacagttggagccgggtaacacaatcaccgcaaatttcactgtgcgacaacctcctcaacttcatatcggtagtcttcaatgactgtattggcaaggagcttttcacacatttctttcacgagcgcgtcaagatcgcggtcagatttttcgatcgtcagctccatgtattttccgatgcgcacatcctgcacttcattgtaggtcatgctgtgcaatgcatgctgcactgcgcttccttgaggatcgagcacactttcttttaagctgacataaactttcactttatacattatgaaatgcctcccagtcttttgaaaatctcttcgtatgcgtcggttaagctccccaggttccgtctgaacaaatctttatcgagcttttcgtttgtgtctttgtcccacagacggcacgtgtcaggagaaatttcatccgctaaaagcacccgtccctctgcgtctaagccgaattccagcttaaaatctattaatctgaccccgcagtcttcaaaaatatgctgaagttcttgattcacctggtttgtaatcgatttgatcgtttcgacatgctcaggagccgccgcttttaagagccggatatgatcttctgtgatgagcggatcgccgagtgcgtcatccttgtagtaaaattcgataatcggctgcgggagctctgttccttccgggatgccgagacgtttcgacatgcttccggcggcaatgtttctgaccacgacttcaagcggaatgatgctcacttttttgatgagctgctctgattctgaaacacgctccacaaagtggttgtcaattcctttggcgtgcagatgtttgaaaatcaggcttgaaatttcattgttcagacggccctttccgctgatctccgcttttttctcaccgttaaaggctgttgcggaatccttgtagaccacgcggagaatctgttcgtcttcagtttgataaattcgcttcgcttttccttcataaagaagattattgttcacaatattcacggaaggcctcctaacccgaatgttgggaatattcaatctacggcggctgaagaagccgcctccggctggcttcttctataaacctaaacgctcaaagatcaagtcgacgtttttcagatgataattgtagtcaaagcaatcggcaatctgttccggtgtgaggcgggacgtgattttttcctccgcttcgacaagctggcggaacggcacttgtttttcccacgcttccatcgctttcggctgaaccgtgtcatatgcttcttcacgaggcagacccgtgtcgattaaagcaagcagcacgcgctgagaatagattaaaccgagtgtgcggtccatgttgcgtttcatattttccgggaataccgttaagtttttgacgatgttgctgaatcggttcagcatgtaattcagcgcgattgtcgcgtcaggaagaatgatgcgctcagctgatgaatgagaaatatcacgctcatgccataacggtacattttcgtatgccgtcagcatgtacccgcggatcacgcgcgccatgcccgtcatattttccgacccgatcggattccgtttatgaggcatagccgatgagcctttttgtcctttagcaaaaaactcttccacttcacgtgtttcactcttttggagaccgcggatttccactgcgaatttttcaatgctcgtcgcgatcaaagccagtgccgccatgtaatccgcatgacggtcgcgctgtaatgtctgagtggaaatcggcgccgctttcagcccgagtttttcacagacatactgctctacgaacggatcaatatttgcatatgtgccgaccgcgccggaaagcttgccgacttcgatcccttcttttgcctgcttgaaacgttcaaggttgcgtttcatttcttcgtgccaaagcgcgagcttcaggccgaaagtcgtcggttccgcgtgtacgccgtgcgtgcggcccatcatgaccgtgtatttatgttctttcgctttttcttttataatgtcaacaaatctctcaatgtccttgagcaagatctcattcgcctgttttaatagataggaaagagcggtatccacgacatctgttgacgtcaggccgtagtggacccattttctttcttcgcctaatgattctgaaaccgcgcgggtaaatgcaacgacgtcatggcgcgtatcctgctcgatttccaaaatccggttgatgtcaaaagacgcgttttcgcgcatgaccttgacgtcttctttcggaatgacgccaagctcagcccaggcttcacaggctaaaatctcgacttccagccatgcctggtatctgttttcgtccgtccagatcgcggacatttcaggtcttgaataacgttcgatcattatgctcgtcctccgtctcttttcatccatatgttcgtgatgtcctgaatccatgtttcatcaggcttccgcaaaaatgtcatatgccccattttgcgcccttttttaatctcatgttttccgtacaggtacagtttggcttcttttaaaagctccgtatgctcctccgcaagcttcacttcctcaccgagcagattcaccatcattcccggtttgagaagatcggttctgccgagaggaagtccgcagaccgctctgatgtgctgttcgaattggctcgtttcacaaaggtcgagcgtataatgcccggagttgtgaggacgcggcgccagttcattgatcaaaaggtctccgtcttctgtgacgaacatttccaccgcaagcggcccgacaagctccaatttctccgcgagctggacggcaagcgcctctgcccgcttttgaaccgtttcctccgctctcgcgggcacgatgctttggaacagaatattatttttgtggatattttcagcagccggaaaggttgaaatctcaccgtgcaccgatctcgtcacgataacggaaagctccatccggaacgatacccagctttccagtatgcacgtgccgttttctagcagcgcggccgcttcgtctgtctgtccttcttccttaatgacaaattggcctttgccgtcatatccgccgcggcatgttttcagcaccgccgggagccccagtgcctgaacagcttcctcaagctcccgtccgctgtttacgatccgataaggagcgacttgacagcctgctgactggatcgcctttttttccgtttccctgttttgggtgataagcagcagctcgcttccctggggaagatatgcatgttctttgagccagttgagcgcctcgtaatcgatattttcaaattcgtacgtaatgatgtcactgactccggccaatttttgaatcgcttcacggtcattgtactgggcggtaatctcaatatcggcgatctgtccgcatggcgagtctttcacgggatcgacgactgcgactttatagcccatctgttttgcggcgacagccatcatttttccgagctgtccgcctccgataatgccgatgacggcgccgggataaatcgtttttttatcagacaagctgatcactgctttccagcaccgtttgttttgtcgcatttcttctcgcctctagtttatccgcaatgtcaccgtcaaatgccgacaaaatctgcgcggctaacagacccgcgttcactgcgcccgcttttccgatcgccgttgtcgcgaccggcacgccgccgggcatctgtacgatagacagaagagaatcaagcccgttaagcgattttgtctgaaccggtacgccgatcaccggcagtgtcgttttggccgccgtcatacccggcagatgcgccgctccaccggctccggcaataatgacttttaagcctctgtctctggcgctttctgcatattcaaacatcaaatcaggcgtccgatgcgcggatactacctgtttttcataaggaatgtgaagttcgtcaagtatgtcgcatgcatgtttcattgtctcccaatcggaggtgcttcccatgatgattcctgctagcggctgcattctgttcccaccttctcatgctttgtttttcagaaaaaaaagcccggcttatattgcaactatgaggaagcaatacaaaccgggcatggcgcgcgtatcgtcagtcgttcgcttctgcgatatccatgtcagctgtttatcactttcctgcatagtccggccgtttacggcagccgggtagaaacttatgggccatattcccaagattatatgaggtcgtgttttgatttcatgtttatcttaacaacggacttggataatgtcaacgacattatcgaacgatataaaaattctttcttttaatgttcgtgtttagatcaatttcccttcaaatacgatttttttcccgcaaggaacgacttgaattgatccattttctttcttttctgtaaagatcggctcttccatccgccggacgggcatataaccctcttccttcattaaagtgagaatggtgtcaatcgtttcatgttccgttacttcaaaccgtttcttttttggctttgtcattccttaattctcctcttcttcactgctttcacccagaatccgccgtggatcgttttcggctcaaaggcgatgataaacgctttttcatcaagcgttttaatcgtatcatacagctgaagctcatatttgcgcggcgtcagaatctgcatggcggtccggtctccttcaagtccgcccgcaacccagcttgtaacaccgtatcctttttcccggagctgtttcggcaggtccagatcgagctccttcgtaatgacgttgactgttatgtagccgagcgccagtttttcttcaattttcattcccactatgacgccgaggccgtagccgagcgcataggcaatgacgttttgaatttgattcagattgtcgagcacaagactcaggccggtcacatacacaaggatttcaattgtactgatgcctgcggcgaaatagcgctgtccctttaatgtcagaatcatcctgatcgtaaagaaagagacatatataatgttaatgatgagaataatgagaaccatacctatactgttggataaaattgtctgcatcactgattcccctcctctgactttgaaaagccaatctttcaattaaggatagtttaccctcttttcatcattttcaaaagaaaaaaaagcccgccccgcaaggcagactctcaagctcttatcagtgaagctcggcttttttcaatcgtttgacggcttcatattccttctcaagttcactcagcgtgtacccggacagttcctgaacatggtcttgataaaaccctgagcggatcagttttgtcctcaggtgctgttttttccgattaatggcttctcgcaacaacggggccatcttcatcatccctttccgaatcataaagagtagtgccgctttcgaattgctgttgctctcatcatatctcggccgggtcctcaaaacaacacgcttcattagaaaaatttgtaaacattgtgaaagacaaatttcgacttataaaggaatcagcgaagcagtaaagtactcggaaatgagcggccatgtcacagccgtaaaaacgagcatgatgatgaccgccgcggaaatacagtacatcacgtcagccgcaggcttttcagccgatttgtatagaatctgcacaaactgcaccatcgccgaggcggccagaaacaaggtcagcgccgtaaacaccacggtgatgaccggcagattcaatatcgcgaaaatcatccacacgatagagcaggcgacagccggaaccaaaagcgatccgacccccgcggccgcatcccgcatcgtaattttctgcttcatcatataacgtgatacaagccagaccgcgccggccgcagcggcaaaaaagacgagcgtatacacgagaacgacggtaaagccgtcaaaaaacgtatgatgccgctccccgtatccgagaggcctttgctggcttgccctcagctgaaaccaatttccgattgagaaaaagatactgaatacaagcattgaaataagagcatatttaaagcgggaaaagccgtcttccccaacgaccttcaccggtgatgtcaaaatgcgcagcgcgaaacggcaataacgtttgaccgcggcccatgcagaagcgagtttttccgtaaaagccggagccgggcgccgttccttttcttttttcttttgcttttgataacgtcccgcatttctggacattctcgacagcggttcttcatcagttccctgatgctgtttttcttcttccaacgtttcttttctttcttccgtcatgtcagcaactcctatcaaaaaaatacggcggaatttgtttagcaagaaaataaaacacttatataaggtaccgaagcggccttaaacagtcaagcggttttcttcacccggacacccacatgacgttttatattatgtattggttttacggaataggacaaaaacaaaaaaccggctttccccagccggtttttccgttatttcaagaagatgaaatacaggataaagatgacgaacagcccgtacataatcgggtgaacgctttttccttttcctttgcagatcattgtaatcgggtagaaaataaaaccgatcgcaatccccgtcgcaatactgtacgtcagcggcatcataatcatcgttaaaaatgccggaacagccacctcgaatttatcccaggcgatcttaccgagcggcgccaccatcagcgcgccgacgataattaaagccggagccgtcacattcgtggtgacaactgacagaagcggcgagaaaaacatcgccagcaaaaagagaatgcccgtcacaacagccgcgaagccggagcgcgcccccgccgcaacgcctgagctggattcaacataagaagtcgttgtagacgtaccgagcacggctccgataacgattgatgttgaatccgccaaaagcgctcttcccgcacgcggaagtttgttttccttcatcagcccggcctgtgtcgctacagctaccagcgtaccggccgtatcgaaaaatccgacgaacaggaaagttaaaatgacaatcagcatttgtacggagaagatatccggaaggtgcatccacgcctgtccgaaagtcggcgcaagactcggcacgctgccgacaatgtgtgtcggaaccggaatcagcccgcagatcataccggcaaccgccgtcaaaagcattccgataaacacgccgccgtttacgcgaagcaccatcagaatgaccgtcacaataacaccgaaaaccgtcagcagcacagggccgctgtgaatattgccgatagacaccaaagtcgatgagttcgcttcaataatgcccgaaccctgcaaaccgacaaatgtgataaacaaaccgatacccgcgccgaccgccaatttcagctcaggcggaatcgcattaatgattttttcccgcaatcccgtcagtgaaagcgccacgaagataattccggaaatcaagacgccggaaagcgcagcctgccatgaaatccccatgccgagtacgacagagaaggcaaaaaacgcatttaatcccatacccggcgcaatcgcgatcggatactttgcaataagccccattaaaatacagccggccgcagatgccaaggctgtagcggtgaacaccgcgccctgatcaatttttaatgcttcgggaaatcctttcacaccgtttaaagacaatgtcagcggattgacgaacagaatgtacgccattgacaaaaaggtcgttaaaccgccgatgatttcattacgatagcttgtccccagctcatcaaactgaaaaaattgcttcaagccaattgcctccttcattctctcccatttattctgcccgttatccgccaaataaaaaacgccccaaatacatttgggacgcttgactacatacgttcagtctgaataaataagaatggattatttatatcaaacgattgagattgatccgtagtcaagccatttacggtagcttggtagaaacttgcgggccatatccccgccattatacgatatctgcatatttgatttctgagtctattgtatcaattcaattttgaaaactcaataaaaaaacgaacaatccagttaaaaaaaattggtttattcgttaattgaccaaaaatggaagacggcaagggccgccttcccggcatcattttccgttcgcaggccgaaccggcaccgcgaatgtgatccccttgtcatccgccagcaagttcataaccgtttgattgacgtacaaagcatatgaatcgaatgagaaatcgcgcaatgaatagtctttatcggatgaatcatctaattcaaaaacggattccatttcaccctttttaagattcgtgactttcgccttattccctttcagataatagcctttttcatactcattaagcgatggccaagttttcatttttttcgtattgccgagaccgattgattcaccgacattcatcagctgatctttatccgctttgctgtaattaattcctgtgaattgataatcgacgatcacccgtctgtcttgctgtttgatctttttgatggtaatgccgacatgatgatgtttcgttttataactgacgggcagttttgttttcagaggcacgatttctcccggctctgattctgtttttatatcacccgttatgaaaagtgttttcgctttcgggtctatcggtttgctgaattgagtttggccgcgtattcttttcccgccgccgggaagattcttcctgccgccaagttcaatattcgacatcgtcatttcataatggtttccagcatcatccgttgcttcgtcaatcgagatggcatcatttttggctgcatcatagaagtcgatagaatacaggagagccgatcccatcgttccgttttccgcccggatatcgaaaaagcggtataatccgtgatttacattcacagctttcgttccttcaagagaaacggacttttgttttttaatagggagtgtaaagcgccagtttccggggatatccttgatttgtgtaatgacaagcggaagcttatcaccgtctttcagctttgagccgtccgtgaacaggcgaagctgccccgcgtaccgcccgtctttcatttttttcatatcactgctgtcataatcctctgctaacatattccgtggatctttataatcgacttgaaaagagatgctctcctcatctgatttcaaattatcaacgataaagttataaacgagctgtccgctgtcgtaatacacacttttcactgtcaccgtgattccgcgtgattccgctttttcgttcagttttgtcaccaaattgcttttaaacagcgcagaacctgccttatcctgaaacagactgtaaatttgtccggcaacaggaatgtttcccatagcggtgttaacggagggcatgaacaagcctgaggacagatacagaataaacagagcagcagcaaccgcgaggccgtttatcacttttcgtccccatctccgtctgacggcgccttcttttccggcacggacagcagcgctgtgtatcacgtttttcaactcagctttcggcacgtcaatgtcctgatacaattgcttcatttgatgcttttccatatgtgtttatcctccttttccagttcctgcttcaatgcttttctcgccctgtagagatgcgtttttacagtgccttccgccataccggtctgttcagcgatcataccaatcgagaaatcttgaaaataataaagctgaatggtcagctgtatatgttcgtcaagcgtttccagagcattccgaagatctatgtattcttcaatattcttattctccgcgcgcgtatcgtgctgcggctcaaacggaatgacgtctccgtgctttttcctcatcgcaaaaatcgtatgaagcagaatccggatcagccacgttttaaaatatttcggctccttcagctgtgcgatatgaagaaaagccttgtaagccgtttcctgaacagcgtccagtgtatcttccttgtgatgcaaataaagataagctgttttatataaagtctcctgatgggttgtgatcagtttttcaaaggctgcggcatcaccttttttcgcctttttgatcaatcgttcttccttcaccttatccacctcctatgctgttagatatgaatcggggcaaaacggtttcaaaaagatgaaaaaaaacgcctcttttttaaaagagacgttttttatcttcatttattcccactcaatcgttgcaggcggcttgctcgtaatgtcatacacgacgcggttgatgtgtttcacttcgttgacgatccgtgttgaaatcacttcaagcacatcccaagggatacgcgcccagtcagatgtcatgccgtcaattgatgttacggcacggataccgattgtgtaatcatacgttctcgcatctcccatgacgccgacgctgcggatgtcaggaagaaccgtgaagtactgccagatgtcgcgctcaaggccgtggttcgccacttcttcacgcagaatcgcgtctgattcacgaacgatttcaagtttttcttccgttacttcaccgagtacgcggatgccaagtccagggcccgggaacggctgacgccatacgatatcatccggaaggccgagctctgtgccaagcgcgcgcacttcgtctttgaaaagggtgttcagcggctcgatcagttcaaactgcatatcttcaggaagtccgccgacattgtgatgcgatttgatcgtttgcgccgttgcagtaccgctctcgataatatccgtgtaaagcgttccttgcgcaaggtaatcgatgcctttcagcttgtccgcttcatcatcaaatacgtaaatgaattcgttgccgatgattttgcgtttttgctcaggatcagaaacacctttcagcttgtttaagaatctgtctttcgcatcaactttaatgacattcatattaaagccttcgctgaacgttttcatgacgccttcagcttcgcctttacgaagcaggccgtgatcgacgaaaatacaagtcagctggtcgccgatcgctttatgaattaaagcagccacaacagaggaatcaacaccgccgcttagcgcgcaaagaacctgcttgtctccgactgtttcgcggattttttgcatttcgatttcgataaagttttccattgaccattcgcctttacattcacaaggcccgaagacaaagtttttcagaaggtcatttccgtattctgaatgacggacttccggatggaactgcacaccgtaccattttttgtcttttttgctcatcgccgagttcgggcagtgatggctcgtcgcgtctaccgtaaatccttccggcacttgtacgactaagtcgccgtggctcatccagacaacttgttcttccggaagatccttgaacaagtctggagttccttgaatctgaatgttcgcttttccgtattcgcgctggcttgccgcctcgactttccctccgaggtaatgagtcatcagctgcatgccgtagcagatgcccaatacaggaatatcgagttcaaagattttttcatcacagcggaaagatccttcatcatatacactgttcggtccgcctgaaaggataattccttttggattcatttctttgatttcctcagctgtcaacgtatggggatgcagctcgctatatacgccaaattcacggatccggcgggtaatcagctggttatactgactgccgaaatcaagaacaagaatcatttcattcactaacttcgtcatggttgtcacctaatctcctctaagtttttgacacagaaaaaacggaggacacacgttcagccctctgtcggcaagacttgtccggaagcccggctttttaacgctcccgggctcccatttaacattcatatattctaacaacaggacgatatgcggtcaagactatcttcttttaattatattttcccacaactgtcccgattcattccaaagctttgcggcattatcgctgcggtataaagcacgctcatagcgcagcgtcagctcggacatgtcgtttgtatggtgcgcctcatcaacccttgcggcaaaatcgcggagcgtttctccgtctcccctgctgaacccttttcgtttcagctggcggagcagcgcggcatatgcgtcgaaaaagacgtcttcatccgttcgccgcttcaatccggctgctgtaacgtgcggaatccagcgcacccggaacagccaggcgagtgccgccgcggctgaaattacgatgacgatggctgcatacggccacaggtgtgccgcggttttgttgcggatcacaggctgcggtgccgcgctgtgatcccgctttttcggtgtttcttctttttccggctttgtttcctgacgctgcttgtcagacggtgaatccgaattccccgctgagcctccgctgtcttttgccgcggtatgattttgctctgacgtaaactccgtcggattggtgaagccttttgtcggctcaaacgtcacccagccctgatcgggaaaatacacttctacccacgaatgggcgttgttgtttgtgacttcataaatgtggccgttatggtcgcctgcccctttatattcaccggatgtatagcccttcacccagcgggcgggaattcccgcagagcggagcagcacggccattgccgatgaaaagttatcacaatatcctcttttcgtttcaaacagaaattgatcgacataatcctgattgtgctccggaaccgcgacatcctgtgtattatacgaaaatgcggaagatccgagataatcctcgatcgccttcgctttatcgaacatattatgatgatcccgcgtcaatctgtccgcaagctgtcgcactcttcccggaaggctgtcggggacctgtaaataccggtcattgaattgattctgctcacggtatcgtttcactttcacttttctgagatcattcagcttaaagacgggcgcctgaaaagtcaccgtgtaccgtcccatattgcggatgttgcccacttgttcactgaccggcgtaatttgctcggtgtttccgttcatttcaagctgaatcgagtgcttcggtttaatattggagacgccgatcggatacatgacgtgattatagagataattctcatcaatggacacctgtgccgtataccgtctcgtctgcacactccggtcaaaccatatatcttccacattgccgccgttcagtttataggacatgccctgatcggtctccacccagcctttccccgtgtatgtatctttcgtttccacccggaagtacgcccgttcttttcccttccatgtaaaaaccggcgtatcatcctcctgaaaaggaccgcccaatgtttcatcatgattgccgtagccgattttactttcggcggcgggcacttctttgtggtttgtgattttttttagaaacggcacgggatccggccagttcgggtctgatttcggagccgccagaccgaacactacggaagcgcagataaacagcatcagcggcagaaaccatttgagtatcaatctttttttaaacgctatgtgttccgtaagccggatgcgctccatatacaaaagccccatcatcaaaaagccgataaagacgatccggatgacggcgtacgcggcatcataaggagtaaacgtatcaagcacggtgatatacgccaccgtcatgataaaaaagaataatattttccgctgatagatcacccagtaatgcagcaaatacacgagcagccataaaagcacaaaaaacagcaacgtgcggaatgacggattcatatcattccatcttccggttccgatgtggcgggcattttgcatcacgtcccgcaaaaaagaaacgagccattccggctgaaaaatagaacctttataaaacaggatgtgaatactgatcaacgtaaacagaatgcaggacggcacggtcacgtaccacctcatccggaagaatgacagcagaaatgccaaaccgataaaaacgatgaaaaaaccggtatgttttgtatccgtaaaattgtgcagcggcctgagccattcccataacaataaaaaagcgagaaaataaaacagcagcagactcagcctgcttccctggttctcgtcatgcggcatggcgcgccacctctctttctaaacaacatgggacacccgtttgtccctgatcatttgcaccttaatatttttctgagcgaagatgagagcgagtttccgttctttctccgaaagcgcggcattcgtttctttcgccaaaaacaccgtcatgtcagcacggccgggctcagcctgtttgagaaggtcttctgtaagactgcccgtcacgacggcaatggaagctttacccagttctttccctaaacgcccgcctgcatcggcttcttccgactctgaagctgatgccaggtaacgcagcatctgtctgaaatgccgctctccctcccggacgggaaatacagtccggtcgctccccaatgaaataaatcctgcgggagagcccttcacaagcgccgtgtaaagcagggatgccgaagctgacaccgcggcttcaaacgaaggggacggcctgcagtccaaaaggagaatcatattcatactctgcaacgggtcaaattccttcgtcatcagctcatttcgacgcgccgatgttttccagtcaagtgcggaaaaccggtcgcccggctgataatttctgacgctcgcagccattgctgtgcggtgtacctgaaacggagcgccggcacccgcaccctcttctccggatgcagcctgcggcttatagtgaacaggcccgtacgccgggaaaaccagaaccgtatccgttacggaaaacgacgccgtcttgtccaaaagcccgagaacatctcccgtccgaactctgatcgtatgtaaatgatgctctccgcgcggcacctgcggcagctcatattgtaacgtcatcttcctttgaaaccacggaaacacaagctgtttcgcactgcgcctctcaccaagcgtttccggcatcacatcttcaatgaccatatatgtcagcggaaacggcaggcgcctcgtcagcctgatggtggcagacagcctgtcgcctgaggttaactgggcggaggacacgtcacgcgtcacctgaaacgcccgcaacgggtacacagcgaccagcccggcgtaaacggtaaacggcaaaaacgcataaaataaaaaccagctcacaaatccgccctgaaacatggcataagaaaagacagccgccgtcagtacggccaacataagcagcttccagccatatagaagccaatgcatcttctttctcattagcggaccgacatcctttgaacgggaactttttccgtttgcatgatgtcttctataaccgcttccggcgtcacatcgttaaatttcgcctcggcggtcaagatcattctgtgcggcagcgtatacggagccaaatactggacgtcatcaggaatgacgtaatcgcggtcatgaagcagcgcgtacgcctgcgcggctttcattattgaaattgaaccgcgcgggctgacgcccagatgtacggacggatgccggcgggtatgctgagtaatgccgacgatatacgctttaactccatcatccacccgcacctgctccagtttttgctggagggtgatgaactgttctttagaaatgacgggctcgattgtttcaagcggattgcgcccttcctgcaaagacagaacccgaagctcctcctcggcagtcgggtagcccatgcgcagcttaaataaaaaccggtcaagctgggcttcgggaagcggatacgttccttcatattcaaccgggttttgtgtggccatgacgaaaaacggctcagccagccgcattgtctttccgtcaatcgtgacattcccttcctccatcgcctcaagcagggaagactgagttttcggagaggttctgttaatttcatcagccagcacgatattccccatgatcggtcccgggcggtattcaaattccattgttttcgtattataaatagagacacccgtcacatctgacggcagaagatccggcgtgaactgaatcctcttaaagtcagctccgatcagcttggccaaagcccggaccatcatcgtttttccgactcccggcacgtcttccagcagcacatgcccttttgcgagaatggcggccagactgagtatggcgatatcccgttttcctatgatgatgttttcaatatgctcaacggctttctccagcagcggatgcagctcttctttataagccattcttctcctcctagtcatctctcaaatttcaattatcgtaacctaactttaccacaaaatataaacagtataaaaaaacgtttccagcgaattgtttccagtccgaaaaaggaaaaaagctccctttagaaaggaagctttatttcagctggagaggctccatatgaacgtgtgaatggtcaatggcatgttcctctttcatcccggcgccttctgctgtacgaatgcgaaaaaaatgtcatattttcttacatcattttcaactgtctgtggcatttatgatagaataatacttgtctgaatattcagcataaacaaaccaaaaggaggcaaagaatgaatcagcctaactctttatctaagggattaaaaacccggcatatgaccatgatttcaattgccggcgtgatcggcgccggattatttgtcggaagcggatcagtcattcattccaccggacccggagcgattgtctcctacgctttagcaggattattagtgatttttattatgagaatgctgggggaaatgtcctccgtcaacccgacaagcggttcgttttcacagtacgcgcatgacgccatcggtccttgggccggttttacgatcggatggctgtattggtttttctgggtcatcgtcattgccattgaagccattgcaggcgccggaatcatacagtactggttcccgggcattccgttatggctgacgagtctgcttctgaccgtgctgttaacactgacgaatatttattcagttaaatcgttcggcgaatttgaatactggctttccttagtgaaggtagcgacgatcgttgtcttcttaatcgcgggatttgcgttcattttcggaatcgttcccggcagcaagccggtcgggctggaaaatttggcgggcagcggcggatttttccctaaaggtccaagttccgttctgctcggcatcgtcgttgtcattttttctttcatgggatctgaaatcgtcgcaatcgcagcgggagaaacgtcaaatccggtcgaatccgtcacaaaggcgacccgctcagtcgtttggcggatcattattttttacgtcggctccattgcggttgtggtcacactgctgccatgggattcagccaatattttggaaagccccttcgttgccgttttgagccatatcggggttcccgcagccgctcaaatcatgaatttcatcgtcctgacagccgttctgtcctgcctgaactccgggctttatacgacgtcacggatgctgtattcactggcagagcgaaatgaagcgccgcggcgttttatgaaactgagtaaaagaggcgtaccggttcaagccattatcgccggcacctttttttcctacattgccgttgttatgaactacttttctccagactccgtatttttgttcctggtcaattcatcaggggcgatcgcactgctcgtctatctcgtcatcgccgtctcacatctgagaatgagaaagaaaatcgaacggacaaaccctgaatctcttaaaatcaaaatgtggttctatccgtacttaacctacctgacgatcatcgccatttgcgccatcttgttatctatgctgtttatcagttcaatgcggtctgaatttctgctgacaggatttattactctgctggtacttgcctcatatgtattccgcaaaaaacaaaaaccgaaagagagcgcttccgaaagccgggttgcgcaataaccgcaaacacccccctcaaaaaagggcgggtgtttttttaaccaacctgttccaggcagcattaactgtagtacaggatttcaataaatgataaggacaggatgaaaaatggcactagaaaaatttgcagatgaactgccgattatcgaaacactccagccgcagaagaaatcagacggcagcacgtattacgaagtcaccatgaaggaatgctttcacaagctgcaccgcgatctcccgccgacccggctttgggggtataacggtttgtttcccggcccgacgatcgacgtgaacaaagatgaaaacgtctatattaaatggatgaatgacctgccggataagcattttctgcccgtggatcataccattcaccattcagaaagcggccatcaggaacccgatgtcaaaaccgtcgtccatttacacggaggagcaacgccgccggacagcgacggctacccagaagcctggttcacaaaggattttaaggaaacgggtccttattttgagaaagaggtataccattatccaaacaaacagcgcggggctctgttatggtatcacgatcacgccatggcgattacgaggctcaatgtgtacgccgggcttgccgggatgtatatcatccgcgagcgaaaagaaaagcagctgaagcttccctccggagagtacgacgtaccgcttatgattttggaccgcacgttaaatgacgacggttccttgtcttatccaagcggacctgctaatccttccgaaacgctgcccgacccttccatcgtcccgtttttttgcggaaataccattctcgtcaatggtaaagcgtggccgtatatggaagttgaaccgcggacatatcgtttccgcatccttaatgcctccaatacgagaacattttctctctcgctcaataacggcgggaagtttatccaaatcggttctgacggcggactgcttccccgctctgtcaaaacacaatctatcagcttagccccggccgagcggtatgatgtgctcatcgatttctccgcctttgacggagaacatatcattttaacgaacggcaccggctgcgggggcgacgtcgatccggatacagacgccaatgtgatgcaattccgcgtcacaaaaccgctgaagggagaagacacaagccggaagcctaaatatctttcaacaatgcctaatgtaacatcaaaaagaatacacaacatcaggacactgaaactcacaaatacgcaagacaaatacggccggcccgttttgacgctgaataacaagcgatggcatgatcctgtgacagaagcgccgaagctcggcgcaacggaaatctggtcgattatcaatccgatggggggaacccatccgatacacctgcaccttgtttccttccaaatccttgaccggcgtccctttgacttagagcgttataacaaattcggcgacattgtgtatacaggccccgccgtcccgcctcctccaagtgaaaaaggctggaaagacaccgtgcaggcgcactcgggggaagtcatcagaatcgcggcgactttcgctccttacagcggacgctacgtatggcactgtcatattttagagcacgaagattacgacatgatgagaccgatggacgtcacggataagcagtaaacaaacatcccccctttctccagaaggggctttttttatttatccaaaaagaaaaaataagaaggcgcttttttgcatatactgtaataacaggaagacgatgcaccctcattggaaatctggatagaaaaaggaattaggagattagggaaaagtatgagacaatgaaggagtgcacgaaaattcataagggaagaagtgactttatgtcttactacaacaaacgtaatcaggaaccgctgcctaaagaagatgtcagtacgtgggaatgcacaaaagaggactgtatcggctggagcagaaagaattttgccggcagtgataccccgacttgccccctttgcggcagtaaaatgatcgacggcgtccgttcgttggtaaatctccaaaacaataatcaaacggcatcaagttagacctcccttttacgagtctcaacatagagaaggcctccatgtctcatgagaggcctttgcgttatcatgtccttttatgatgcaaaggagcaatgaacatgaaaaacgatcggcagcagaaagatctgaaggaaatggcaaaacggcggaaaatgaaccttgccgcacagtcattcatcgaaacgcttcattttgccgttccgattctccgttttttcaaatggctcgcctcagccgcagccagctttgttcatgaaaaaacacccagcgggcgctgagtgtttttttcatgattggatgacggaaaaactattgataatgccgtggtcattttcccagactttttcgcattttttcgtatccaaatgataagcataaatggtccggaccttcgcattccgccccgtttcatccttcagacgcttagcgccttttgcttccgccatgaaataaatgatgctgccgtctttagaaaactgaggctgggcatcaatcagcggagcgaagtccttcccgtttgagataatcgttttatcttttttcgttttgacattcatcagacggatggacgctttttgttccgtccctttttgtgtataagatgtaaagacaaggttctttccgtccggtgacaccgccacgccgctgataaactgttcaaggtttgtcaggtcctgaaggtgttcgccagctcctgctgcaaaccggatattcgtcggttcagggtcaatccccttctcatttgcctcatccgttttttgataatcctctttgacggaataatgcagaagcgcaaaatcgttttggctgcggttataaaagaagctgcttacactgtcgtctttctcatcggcggcaggatacagattttcataacgtttcgttttcaaatcaaaagatgcgagacggaaaatatcttcatccgcttttccgagacggaaataaatgtgcgtcagatcctttgataaaaacagactgtcagcgcttgccgttcctttataaagcaccgtcttctttttcgtcttcagatcaagcttatacagacgcatctcattttcgtcattattcccgacaaaatagagcacctgatgggcgtcatccagcgcaaacgccggatatgccgaaagcttttcctcgtacagcacgcggccgtcctcgtaatatttcgtcatcagatctttgtctgtaatggaaacaagcagcttgtcatggccgccggagacaacggcttttccgccgccgtcgctttttcctttgatcagtaaaacggacgcgatgaccgccgccgccaaaacggcggcaagcaacatccagatccatcgtttcttcttcattatcaatctctccgtcaatcagaaaaagcaagaatcagagtccttgctttttaagatggtctattttaatagctgtagtgtccggatactcttcctttgcttaacggatatccgagcgctttgaacgctttcgggctgacatccaatacggcattcggcagacggcctacatcatttttatatactgtgataaccttttttggttttgctttcgcataagctctgattttcgttccgtttctcggaacgtcaaatcctaattttgtcgcgcaatcccagtgtcccagttttttaccggaagatccttttttaccgactccattataccatgtaatatttccgttcacttttttagcacttgcatcagaagagaaactgatcgctcccagcgtgcttcctgctaaaatcaataaggctaagaataacttcttcaagctttcgtcctcctgattctttattctaggcaaaattatacaccaagaagacgattataatatttcaatcactttacatgttcattacaacgtgatgagacatgcacataacgacggcacaattacctgttctatataattccatggtaaattatactacaaaatttaattcattagcgttataatattcatagagtatttctgcattcaatatggactttttataaggcctattgatagttgcataatatgatatattttgagaaatcaggctttaggaagcactttattccttttaaccgtggttcatattgatcatgtacctatactcgtttcaatcagactaggagtgataatcaatgaaagcggcaagatggcacaatcaaaaagacattcgaatcgaaaacattgatgaacctaaagcagaaccgggtaaagtcaaaattaaagtcaaatggtgcgggatttgcggaagcgaccttcatgaatatttgggaggcccgatctttattccggtcggcgaacctcatccgttaacaaacgaaatggcgcccgtcacgatgggtcacgaattctcaggagaagtcgtggaagtgggcgaaggcgtcaaaaattacagcgtcggcgaccgtgtcgtcgtggaaccgatttttgccacacacggacatcagggagcctataaccttgatgaacaaatgggattcttaggcttagccggaggcggcggcggattttctgaatatgtatccgttgacgaagaattgctgtttaagcttcctgaagagctttcttacgaacagggcgcgcttgttgagccgtcagcggtagcgctttacgccgtccgccaaagcaaattaaaagcgggcgacaaggcggcagtttttggctgcggaccgatcgggctgcttgtgattgaagccctgaaagcggccggcgccacagatatttacgcggttgaactttcaccggaacgtcaggaaaaagcgaaagaactcggcgctatcatcattgatccgtcaaaaacggacgatgtcgttgaagaaatcgctaaacgcacaaacggcggcgttgatgtttcttatgaagtaacgggcgttcctgtcgttctccgccaggcgatccagtcaacaaacattgccggtgaaacggttatcgtcagcatctgggaaaaaggagcggaaattcatccgaacgatatcgtcatcaaagaacggaccgtaaaagggattatcggataccgtgacatcttcccttccgttcttgcactgatgaaagagggctacttctcagcagataagctcgtcacgaaaaaaatcgtgctcgacgatctgattgaagaaggcttcggcgctttaatcaaagagaaaaaccaagtgaaaatcttagtcaaaccgaactaaaccgttcagctgaatatcagacacatccgaaaaagagccgttccggctctttttttcatctcatcgtctttccttccttttccttttaaaaatgatcccctctgcgcaaactatttttcaccctgtcccgtctatccttaggcagcagcctatgatacgtattttttaaaaaggagccctttgaagcaatgaagaacgaaacagccaaagcgtcgcttgtgacgtgcataactgagcgcaaggaagacttttaccggcttgcgtacagttacgtaaaaaacaaggatgacgcgttagatattgttcaggaatcaattcaaaaagcgctgacatcggtcgaatccgtcaaaaaccccgatgtgatcaaaagctggttttataaaattttagtgcgcacggccattgattttctccgcaaacagaaaaaactgaaagtgatggatgatgaaacgatcgagtttttaagccgaggaaaggaagatcactacaaggacacagaccttcacgaagcgcttgatgacctgccgcatcaatataaaaccattatcattctgcgtttctttgaagacctgaaattagaagaaatcgcggacatcacgggggaaaacatcaacaccgtcaaaacacgcctttacagggggctgaagctcatgcgcattcagctgacgaaggaggatctttcttaatggaaaagagattagaacaattaagagaagagtataaaagtgtgcccattcctaaggaactggacagcattgtcgaaaaagcccttcagcaaaaaccgaagaaaaaacgaatcgtgatgtggccgacatccgcggcagtcgctgcggccgtcttatttaccgccgttgtcaatatcaacccggatgccgcacaagccatgtctaaaatccccgtcatcggcaaagtcgtccaagccatcacattcacggagatgaaggaagaaaagaaccaatcaagcattgatgtgaaaacgcccgctctgtccggactttccgatcataaactcgaagacagcatcaaccggcattatatgaaagaaagcaaagagctgtatcaggaatttatgaaggcgacctcaaaaagcaaaaaaggccacctcagtatttacagcgattatgaaaccgttactgacacagcggatctgatctcaatccgccgtgatatcgaaaaaacgcaagcttcatcttatacgcaaagccgttacatcacgattgataaaaagaatgaggccgtgcttacgttaaagagtttatttaaagatgaccgttatattaaagtcatcagcgaaaatattaaagaacaaatgaaaaaacagatgaaagaagatccgaataaaatatactgggtcgaagaagatgatatgacggagccttttaaagccatccgcgccgaccagaatttttatattacagataagcacaaacttgttatttcatttgatgaatacgaagcggcacccggatatatgggcgttacagagtttacaataccgacctccgtcatctccaagctgcttgtcggagaccgctacatcagataaagaaagaaaaaaatccatgatatccgcagatcatggattttttctttcgtcccgcaacagccaagatgcataagggacccttttcatataacagacgccggactgggactgaaaagtttaagaaaatcacagcatttcatacattttttctgaaacaaaatccccttccgaatgcgtctaattaacggaacaaatggaagactgtacagaaatcagctatagctatccgcaaaacagcgagaatttccgcacacattattggaggaataccatgtcagacaagtcactgcatcaccgctatattcccggactggatggacttcgcgcctttgccgtcctcgcagttatcgcatatcatctgaattttaactgggccgacggcggtttcattggtgttgatatcttttttgttttatcggggtatttaattacatctattatattgcctgtccaaggcaatgccatcacccttgatttgcgtgatttttgggtgcgccggatcagacggcttctgccggcggcttatctgatgattatcatgacggtcatttgggtcgtattgtttaacagcgagctcctgcataccgtacgcggagatgcggtctcctcacttttttacataagcaattggtggtttatctttcatcaactttcttatttcgacagcttcggctccccttcgccattaaaaaacctttggtcgctggcgattgaagaacagttttatatcatatggcccttcctgctgcttgcgggaatgtacatatgtaaaacacgggcccggcttgcggccgcggtcatgttcctcgcgttatgttcggcagtcgtaatgagtatgatgtatgtgcccggcggagatccgagccgcgtttattacgggacggatacccggtcatttgaattgctgatcggctgcgctttagctttagtgtggccgatgaaacgattatcttccaaacggctgccgagcagcatgaaacacctgcttcacgggacggagcttgccgcttttgccgcgctgctgctttgcgtcttttacacggatgaatatgaacccttcctgtacaagggcggcatgcttttgatcagcatcaccgcagcggttcttgtcgcatgtttatgccatccgagcagctttttgggacatgtcctttcatggaagccgcttcgctggatcggaacgagatcatacggaatctacctttggcattacccggttttcgtactgagcacacccgtgcaggaaatcggaaatccggtttattggcactgcgccgtcagaatcggcgccactttcattcttgccgagctatcttaccatttcattgaacagccgatccgcactgcgggcttccggccatttttacgccgcgtgtttctgaaccgctttctggaatggaagacgtcctctgtcatcagcagaatgtcgctcggcctcattcttgccgccattctcgtatttgcgggcgggctgtcagggatagccgaagagaaaaaacagccgcaatggacgtacgcgcagaatgatcagcaagaaaccgccgcctcttcgcacaaaacggccgatcacgatcagcctgcaaaagaagaagacagcaagaaaaaacacggcggcgaaaaaacggataccgcgtcagacaaaaacaagaaagaaccagcagacaaatcagatacgaagaaaaacgacgagaaaaaggaacggtcatctcaaaaaacggctgatccaaaacaaacacagcctcagcaagacgtgctggccatcggtgactcggtgatgctggacattgcgtcatacctgcggcagtccctccctcatgtcaccatcgacggaaaggtaggaagacaagtctctcaagcactccagctcacttcggaatatgcgtcatttaatcagccgaacaaagcggtcatcatcgagttagggacgaatggctatttcacaaacagccaaattgaatcactgatcagctccttttcaaaagccgatatctatcttgtcaacacgcgtgtaccgcggcagtgggaaagcaaagtaaacgaatcattgcgccggcaggccgagtcacgcaaaaatgtgacgcttgtcgattggcacgcaaaagcattgcagcaccctgaatacttcacaccggacggcgtccatctcatacctgagggatcaaaagcgctgacatccctcatcgttcaaacaatgaaatcatgacaaaaaaagaggccccaaaaaggcctctttttcgtatatcatcaggcaagtttctgtccgcaattcgggcaaaaattcgcgccttccgttttcgttccgcagttcggacagaatttcggcttagccgctccttccgagccgtttgcctgttcggtcccctgattctgctgactttgattttgctgcggctggttctgctgattttgattcatttggttcatcatttgatttgccacattcattcccatcatcatgcccgccatgtctgaggcggcgccgcttccgctcattttgccggatgacatgccgtccgtcatggaaatctgctgatagcggttcacatcgcccaccatgccgtaagaagcgtttttcgtaatcatatcctgaacttcctgcggatagttaaagctcataatattgaagcccgtaatcgacatgccgtctccgatcagctgcatatcaagatcttcttgaatcccttttccgatttcaaatgaattcgactgcagattgaacatgtcttttccttctctggtgatccatttcatcaaaagctgatcgagaatagacgtaatccggattttaatgtcctctactaaatagctgtctctgacacccgcaatcttatcaatcaatccgatgtagtcaatgaccttgaagttaaatgtgccgtttgcgcggatcggcataccgcccggcatacctgccgccggaatgttgatggcgttttttgtgccccacttcacggtgaactccttcgtattcacaaacagcacttccgcccgcatgccgctgttaaagccaaacttaaacccttttagtgtcgatagaaacggaatgatttctgattcgatatcataatcgccgtcatcacggaaaatcccttcaatcttcccgttgtataaaaagatggcatcctgtcccggccggatgatcagacggctgccttttttaatttcacggttgttccatttatagaaaaccatgtcgtctctgaattcttcccattccaccacatttgctaactgatttctgaaaaaacccatgtatgctcaaatcctttacatataatttaaaaacttcccttgcttccgctgtaactcgtgccgcccctcgtgactccgccgtcattgtcattatctttatctggctttttttctcttgtaatgtcggttcggatatatgtgtcgtgctggctcagcacttcagacgtatcgtgatccatatacgtgctgccggtgacggtgaccttgccgccggaattgtacaccatcacggtgacggcgattccggccgctgctgcagcgataatcagctgaaaccaccatgtgagcagcagattgtcagacctgtcgtccgggcttttccccatatctttataagccatcttgatgtaagtctgaaacgccttttcataatggcctgcggaaatatctgacgagatcgtatttctgatcgtattcagccggctgctgttcaaatacgtctccgcctttttatatccggagagaaatacttcccgatccttcatatcaatagtcaatatcgccgtgcttccgctaaaatgactgtcataaaaatcaccggcatactgttcgatctccttaccgcccgttccgtttgcggtaagaatgataaaatcggtatggcgcttttctcccagcttcccggccaattcctcaagtttcttcgtttcatccttcgttaataaatgagcattgtcataaacatattgcttctgttccgcggcagacgccgatgtatgtaaagaaaaagacagcatcagaaaaaggacgaagcagaagagacacgctttttttatcgatactttcatcaaaaaccgcctcctatcataagtgagacgagtcttaatgctaaaaacgcaccggcggttatgccgccgaaccacgcggccacttttccggcactgatcggcggtttgccgacaaccttgcccgtctgcccgttcatcgcaaaaatgtgctcagcccgctcatagtcgtagctgaccatccagaccggaagcagtacgtaaaagctgctgattttatcggtctgaatctgctcatccgtaatgtcagccgtcgtatacccggagaaggtggatctgatataagaatcaatataatggctgattttatccttcgcccgcggaaagagatcgtcatcggtataattgtacttttccgctatatatcccgctaaataggccgtattaaactccttcagctcactgtatgagtaaggctccaatttgtccattaattcatcattcattttttctgaagcgtcgaccggaattttgagataatcaagattgatatcgcggtacgcgttgtaatactcggtctccgtcacccggtattctccatcttcatagtgatgcactctcgtacaaacggcattgacctgaaccttgctgtttaagtcaaacatccaaaacggcacgtacatgccggttatgctcttcacccgatcggcagtcataaatcctttcggtgtcagacggccgtttcggcaccactttttaaaagcgctcatggcttcttctttactgatcgtaaaaggaatcaccatcgaaggcgcgagatttcccgataatcggtcggcgagaacggcggctcctccgcaaaacccgcacgtcgtggccgtcgtttccgcctcagtcattaataccgcgccgcagttctcacagcggtactcgttcgcctcattttcggaaaatctcgttgttatatactcttttggcaggctttcaatctgatcctgccgcccgcagctgtgacatgtcagcatgccggatgaactgtcaaagaccatatcatcgccgcagttcgggcatttataagaaatgatcattctgtttctctcactttctctttatatcggacaaagctgcagcccgctgtctattgatctttactgaaaagcattttctgcttaagcgccgccaactcatcgtcgacactgctttgattgctgtcatatttagccgtcagctcgtcaatatcgtctttcggagacgcgttgagctcagccatcgcattggcgtgatcaagcgcccggttgaccttgtcttccattctgccgaaagctgtcagcgattggcccgcatttgacacagaggaccccaatttgttcattctctcctgcgtttttgccacagaccacttcgctttgatggcatttcttcgcgactcaagctctccgatatcagcgacaagcttgtcatgcattttgcgcatttgagacgcgttggaagaagcgagctgataagccgtttgcagctcagtcagtcttgattcaacagccgttttcctttccaaaaatgtccgcgcatcggcttcattgccggcctgcaacgctttcatcgcgtaactttccatcttttcggcatcagcctggcattctgttaatgctcttttcgcccgctgttcctcagccatgacagaagccgtctccgctttcacttttcctaaatcactgttcagattccgtaaatattgatcaaccattttttcagggttttcagctttatccagcagcgcattgatattgcttgacataatgtctttaaatcttcctaaaatactcatttttcattttcctcccaaaattaaatagtaacaagttcacagttatatatactgtttttttcgaaaaaggtttcattttctcttgaatttatgtatttttatatgaaaatagtctcattcagcccatttgtgccggcggaaattcttcacgagcagatacagtgagaacaaagaataaacaaacagcccgatcatcaacccgctcactaacggataatgcttcgccgcatacacaaagaaatccagctgcgaaatctgttccggacttgtaatcgtatccgtcccattcaaaagctttgagaatttagccgtatcattccaatcaaacgagtcagaaacaagctcactcccctgataccaattgacagcggcgagacaaagaaaacaaaaaacagaaaacgcgcattgcacaataagaaaaacatgtttcataaaaaaattcctccgcggttcaatatcacaggccgtcacactgtacatgacggcagcagcagaaacttggttttactcagaactgataaaaacattattgtatgtacttcacagcggttcaatttactggatgcctttctaaagtataccgtatatcgaaaagggtttcagacctaaataaagaggatgcttcccgaagtccgatgactttcaagaaacatcctccatactttacagtgatacttcaacctcttttaagctcggcaaagcatcaatcgcaccgattttggtgcacacgagcgcccccgctttattggcaaatgagacaatatcacgcagcttcgcaaaatcttcggctgccgtctgaacctcatccgtgcgcgccagctgatacagcgccgcgccgacaaacgcatcgcccgctcccgttgagtctattgatgtcaccggaatgctcggaatgatgtcaatatccttcccatttgaaagaagggtcccgcttttccctagtgtcaccgccacaataccggccccaagctcatgaagaaccgcaacgccttctttatgatccttcgcaccgctgatgatctcaagctcttcgtcactgactttcacaaaatcacttacggcaatggctttttttgcggtgtttataaactctgaaactcttcctttccataaatcctcacggtagttaggatcgaaggaaataaactgtccattgtctttcgcaatcgacatcagccgtaaataggccgagcaaaacggatcagataacaatgccgtcgctgatccgaaatgaaggattttcgcatcgtttaccttttccagatcaatatcatcaagcgtaaacaaagcgtccgctcctctgttaaacacaaagtcgcgctccccgttttgttttaatgaaacaaacgcaagcgttgtaggcgctttctcatccatgacgagcatagacgtatcgacatgtacggcgtccaatgtctgcttcagaaagtacccgaacggatctttgcctgttttcccgctgaaagccgcgtctccgcccagcttagcaatggctgccgacacattcgccggtgcgccgccggcactttttaagaaattgcgcccttccgtcaaatcaacatccacatcggtacaaaagaaatcaattaacaattctccaatacaaataacagattgccttcccacattatcacactcatttatcaattctcgattatagtttcagtatagtgctttctgtcataaatacaaccgtttacatagaatattttaaattttacgtatacttatctggcagccctttgctccagatcagacatcatctgctgatattttttttcagttaaaggataaaaagaaataagaataatagacagcagaatgaacaatcccggaatgagcgcattcatatttttaatcgcattcaatgacgaggcggtctgatcggtattcgcggcatatccggcgattccgagataaacggccgaaaatgaccccgctaacgcaactccgagcttattgatgaaactcatgctcgaaatcaccacgccatcagcccggactccggttttccattccgcataatcgacacaatcggcaaccattccccaagcaagcgtatttaaaggcgtcgtgaaaaatcccgaaacgaaaagccaaaagaaaataaggggaatcgaggaatacgatgtaaactgaaggcccgcataagaaatcagcgataacgccgccgtgatgatcatgacctgcttccggccccgcttcttagaaaagaaaggaataaacagattgctgatcagcgctgcgccgaaaaacagcacggttcctaaaaacacaaattccttatggctgacgttatacgtaaaatagtacaccatcgtgctgagcttaatgttaaacccgatcgcaaaagctaaaaatgaagaaaccaaaatgagcaaaggcttgtttcggaacaaaacagacaacgtctttttcattccttgtttttttcttttttcaggctgaatccgttcccgcacggtaaagaagctgaacagattcaatgcgatgctcaccgccgcatagataagcgccgtcatctggaatccgaacgcctgatctttcccgccgatggcgtccgcaagcggtgtcgcacaggaaatcgataacagaattccgatataaaccaaaatcatccgggtcgtcgtcagaaccgtccgttcctccacagaattcgtcatccgacccgttaagctgttgaccggaatcgtctgcatgctgaaggacatcccaagcagaatataagtgatgtacgcataaaccatgttccctgtctcgccgaaatgaggagtcgtaaagcataagaacgtaaataacgcaaaaggaaacgccacccacaaaagatacggccttgcctttccccatcttgtattcgtcttgtctagaatcacgcccataatcgggtcaaaaatagcgtccagcacccttacgataagaaacaaagctgcgatgaccgcaggcttaatgccgccgacatctgtatagtagaataataagtatgcgtttacaaactgaaagataatattgtacgacatatcgccgaatccgtagccgatccgttccatccaggacaggccgcgatgtttcgtctttactgccgatgctttttctgtttcaatcatcatttcccaccccaagaatccgttttcatttttgataagcaagagggagaatgcaaagatcctccccgttcactcagcgatttggatacaccatcacttttaggcattcatttttgtattgaaaggcgcgttccatcgcctcttgcgtcttctccagcggatattggtccgttacaagatgcttcgtgtccactatgccggaagcgagaaattcaattcccttcggatacgtattcgcataacggaagattccgtatatatcaatctcgttatctgcaataaacggcacattgagcggaatctcgttctgagaaggcaaaccgacaatcgccagttttccgccccggcgcacggaagccagtgcggattgcaatgctgccggattccccgctgtttcccaggcagcatcaacgcctctgccattcgtgatcgttttgatttcttcaccggcatcctgttcccggacattgatgacatgcgtcgcgcccatttttttcgcggcatctaaccgcagcggctccaagtcggtcacaatgattgtgcctgccccgtatgctttcgctgccgcaacggccatcagccccacaggacccatgcccatgatcgcaaccgtggaaccgggctgaagcttcgttctcgcggccgcatgaatgccgacagaaaacggttcgatcaaagccgcatcttcataggaaagtgaatccggaatcgaaaaaacaaagtcctggcgcattttgatatattggacaaacgcgccgtcaaccggcggtgtcgccaaaaactgtacatccgggcaaagattataacgcccttctttgcacgcttcacagcgcccgcatgtgacaccgggttcgacggcgacccggtctcctattttaaattgatcgacagacgatccgacggcggcaatttctcccgcgcattcatgaccgaggataaatggtttttccactacataattgccgattctgccatttgtatagtaatgcagatcagatccgcaaattccgacagccatcaccttaatcaacacttcatcatgattgatgtcaggcacgggcaatgtttcgattttgatttctctcgtgctgtgcataaccgccgctttcatgttttgaggcactgtgtgagtcatttggcaaaatcctttctctgctttgaaatgtaagtgcatacatttttgttttctctgttactgcccctattttatctgcttttccatacgttcaacagcctttcctgctgtataaaaggacagccgcactgtactttttattttttcatatacaaaaaacactgaattgataaaatagtactaataggaggtgcaggctaatggctgaactagaaaaccggacacaatttgcagaactgctggcacctgccgtcaaatcgctgaaacttcatcctgattataaagtcagaaggaaaaagaacgaaaaaacaggacagtcttatatcgatcaaatcgcactccgattaggcgtttcctctaacacgatcaaaagctggatcggacagatgggcgcaaactacattcccggacgaattgacgacggaaagctgttcggcatgatctggatcattatcgaaaagactgacatggatactgaatggctgaccggccttctggaaaccaccaccattcccgtcatcaaacccgcattgcccgtttggacggcgtcttgtctaaaaaaagcaaaaatacaccggaaagacggatcattcggagcgccgagtgatgaagatgttgaaaaagcagtaaagcggctgtttcatgacagacccggccatgaaacgaatgcgcttacagaacagcccgtcacgcataacttaccgtcacgccggaccgggaactttatcggacgcggctttgatatagaggcgatccggcaatggatgctgtctccgtcaccggtctgtttaatcacaggctgggccggcatgggaaaaaccacaatcgctcttgaagcagcctacctttgtgccggcggttcaccagattggcctgcattcaacagcatcatttggatcagcgctgactggaaaggattgagcttcagcgattttttaaacacgatcgcctatcagctcggacgcgcagaacaaatagacaaatccatcaacgaaaaacggttcgtcgtccgtaatgcattagccgctcattcaaacgaaaaacccgtgctgctgatcgttgacagcatcgatacagcggaacgtgacattcacgaatttatcatcggtcttccggaaggcgtaaaagttctccttacggcacgggaaaacgtaaaacagacataccgggacggcctcggggaactggcggccatccagctgagcggccttgaacaaacggatgcccttgaatttttccatcaagaagtgcaccgctgtctgcaaacatgcaacctcccgcaaaaacgggaaaagctggagcagctgcggcggctatcgcctgaccttaagaatgaattcgtctcggcagccgccggcaacccgaaggccatggcactgagcattgcatacatgtcagacgacgacatccccgctccccagctcattcaagaacttaaacaagcgggctactcattattggaattgtttgaggttctctttggccgcacatgggacagatgtcatgaagacacacggaaactatggcagacgctttgctttttcgctaagccccctgatgaaaaaagcttggctcaagcggccggattagacgtccggcggtttcattacgcgattgagcaaatgcggtcatatgctttaatacagccggaacgaagcgaaggaagaattcaatacgcagcccatcaaaccgttgtcgcttacggagaacagcacttatccgaaaatcacgaatttgaaaaaggagcccgcagccgctgggcgcattattatatcgattatgcggaaacccatataaagcgggaacagcccaattctgtctattggagctatctgctgggacggaatttagagcaaatgaaaaaggaatggccgaacatcctaaaggtcatcgaatggtcgagtgaaaccggacaacatgacatcctgatcaaactcatcatccgcatcagccattttctaagcagaatcaacctgcccctgcgaatcgaatacggattaaaagccgccgatgccgcccgtcaatcaggcgaacacacgcgggaagcctacttcaggatcgacacggcaggctgggcgctgatggaagttaatgatgcggacgaagccctcaggcaaatagaagccggcctgaagatactcgaacaatcaggcgcgccggatcacgacgacttgaaagtatggggaatcgccctgcaatcgaggctgctgttaaaaaccggagaaccggacaaagcggcagcaatgctggacggcatcaaagatcagcccgtctcccccattatccggcacagggttcttctggtccgcggcgacctgagtttcgcccgctctcactacgaagaagccatcacattatacgaagcggcaaacacaaccagcgccgcatacggcggcgaaaaaacgatagaagcctatttcaacctgggcatggcttacgtcaagtgtgatcaactcgaaaaagcggaaaaagcctttgaacaaatgctctatgacaaacacaacgccaatcaagttgagttgatctattactattacggaatggcacagctgttgtatcgtaaaggagaaaatacgaaagcgatggaatcgaatcagaaggccattcgtctgattgattcgtgggagcctgggattgggattcggggtgaggtggagcagctgagaatggtgcttgaaggaaatgaggaaatcacattgtagttaggaaagtgtgaggtcaatcttagacaaacgatctcataccttctcttttttataaacaaaaaaggtcttatctagttgagtaactgataagacctttctgatagaacgctatgagcatttcaagtgaactcaacagtcaatcccttggtatacccaagggagattacatcatgccgcccataattaccacggttttcgctcgctttcgcaccctttcaatcggtgttatttttttagtgtgatcatgaatggaaaagaaacaaaaaccgcattgtttcagaccctgacgcaactttcgttatttttgtgttattttttaaaaaataacaggtttgtttgcatcgcgaacacacgttctttataatcgtctccaaggagatgaaacacaatgaccgattttgagcgtaaagtgtatcggattatttttaatatgacccgcttcgggaaaaatccctccatggaacaattgaaaaggaaaaccgggaaagatgagcagacgatccgtgctgctgtgaagaatttgatgaggcagcgcattttgaagtgggataagcataaaaacaggtggaattttaaataaaaaagaaagcagggtatctccctgctttctttagcgaatatgtagcgaatagtaataatagcgtatgtgttttctaatgtgtattcataatacatccaatatatatttcctgtcaagcaaaaaagcaattattttacaacttgtgcttgatcttctgattcagttattttagctaaccctaattcagaacataagatttgatttttggaactgccctttaatttacctttgcttaacacttttgtctcttcaacaataaagctcttttgtttaagttcctctaaaatctcactaataatctctgctggggtcgataatgtatttattagatatcttttgaaccaactcaagcctaagaacagatctccttgtgtaccaaagctatcgtgccatttctttatctcaacaagaatttgattcataagtttatctcggtcatactgcttttcttcaataccaagtaaactcgccaaatcttcagcatgatgagcataattcttaaattcaatatgtttaggagcgtttttagctgaataataaagctcaactctttttcccttgtacattaatctactcataataggaatcatgtcactatcagctgttacaaaaacataacaactaatcgaaggatccttgtatgtattttcaatagcatcaatacaaagttcaatatctgatgcatttttacgatgatccccatcttttccatttgaataaacatgccttatttgaacacgctttttttgaagacttgtcatattacttcttaatttgttaaaatccgcatacactctaaatgaacgtacattgtcttgaccgtatcgttcccataaccttgaaaataaatttttatcttcagattgataatctggatcatggctataattattcattagagaccagtaaacgttatcataatcaacaaaaatagctacattatcaagttttctttcagaattaaacgttcgattcgaatcgttcaccacagatgtcatgatttggaatgctgatttaagctgttcgtcaactgctggttgtggtaatggctgggcaaccgtccctgttcttttttcttttaattcgtccaattaaattccctcatttcattagaaataacacacataaaagaatttaccatatattcaccaataaaagtatattttttgacttcatactagcttaaaagttatgtatttctcccatttacaacaaaaaaagcctcgtccattggacgaggctatatcacttcaataatttttcaagtttcgcttttgttttcggcccataaatgccatcagcaggcagcccgtacatagactggaaccgtttgactgcatttgctgttttcgcgccatatgagccgtcaattccgaagttctttgcgctcttatcggggtaataatgaagagccgccagcgcggtttgaatctgttttacggcctccctcgggtcaatgggcttgtcactttaaaaacacccgcaggcagactgaattttgatttttgagtggttttaggctttgaggcttttaccttcttttggccgccgcttttcagctcgttatcgcttttgatatatgagacattcacatatccgtggaatgtctggcctttagaattggtgtattcaacatatccccatccgttgacagttgatccaagctgatattttacaaccgtgccattcggcaggttaagcaccatggaagaagaggcgctccgttgtgtacgtaaaacaaggccatcgcttgaaaccaccgtgtttttgatgaatcttcctgtgtctgtatgggtaacatccggatttgatacaggcgccgttacaaccacaccatccattcgcttttcaacacggctcttaaaatcggcaaacccttgagagttgcttacccacggcgccgggcaaattttatgtgtaatgtcataatgtcgaacaatatcattggttggatcaagtttgtacattttgcacagctcggcacaaacttgtcctgcacgggcaatcgtatccggatggaaagtgccgttcttttcaatgcaaagctccacgccgatagataagaaatttgcattcggtttcagcgccgcgacaccccggtaaggctgcccgttgacgaattgctgaatgtcattcgcatgataggcaacctcattcaacggaatgatacaaatagcctctgtacgatcgacaaagatatgtgcagatgcaaacgtctgttttttctcagatagatttctgttctgtgcggggagcgtttggccaaaatatctataatgattggcagcaggcgcgccggggttggccgtgtaatgcaccacaagtttcttcacgccgttgtttttgattcccggccgcgtccatttattaatatcaatatattggtttctgtatgctgacataaaatctctcctattctgtttttggattcaaaaaagcagccggattaaccagccgcctgatcatctttttcttttgtctgatcgttgtcgctttcaattacgtgaagccggtcagtgatgacggccggaattttaacgccgatctgcgccaaattctccgtgatggacaggccctcatttgcgatataaaaaagaacggttccaaaggtcaggacgccgttcaaatttgttatcgtatcaataatgttggcgacgatgaccaccataaaactgagcatcttccgcacatacccaaaccacgcgctgcggctccggagctgcttcattttccacgctttgataatgccggtgatgacatccaagatgctgaggattagaagcaagtcaaggtacttcacctccccgaaaagatatgttcttgcgatctgtaagctttcaaaattcatccacacatgtattccctccattttgatcacctccttcgaggcaaaataaaaacacctattcagttacaggtgctggttcactattattttctttcgccgctactgccgcatttaattgcttttcgagttcctcgcgtttattatctgtaaacgtgtatagcgctttatattcggccagctcattgttcttcagattcaattcctgctgtagggaagcagctttatatgctgctatttgtaactggtcctgaagttgctcttttgtcatttcttgcatgcctttcactccttactcttgatcgggatacgcattaccgcgttcgctttctgtaatttcatcatattccgcttgtgtgatgcggcctttctcaacggcttttctcatttcaacggtcaaaacagttccgtttttccagcaatcctcaaaaaacccgaaaagagcacttcggttctccaatgggctccccccgtttccttttattgattcattaagagattgcaaacccgctgaaggtcaagaacttgttcctgcaacttttcctctgtagtcttttccttctctctatcttttgcttcaatatttaataccacgggctcaagcttcatctttgccatcctccttattttgaacatagattgttataagcccttctcggttgccttgtggatcaacgacaatttgaactggaatcataataagctttttgctcccactgtacccttgataataaccgtcaggctctacataagtttttgtgagcaaataacttatttcatcagcctttatatcatgaaggacatataattgatacgctacttttgttgtatcgtccggctgcagatcgaacgaaacagcctccatgggatatgtcttgtctcctttttttatagagccggcagttatttcaattcccgcgccggtttcttctatttcgatgccgtccgcataataaagactcatgttaaaatcccttttttcaaccataaaaattactcccttattgtgattcgtaaaaaataacaatttgaacctttattgtttttcccgcaactccggcagtagtcccggtccctctcactccaatatcaacagaactggcgcttatattttctaatcctaccgtaaccgcattagaatatgcgccaatcgctgtacctaccgccgcaaaaacgttctcaggcgcataatcaaaactatcaacaaaaggaatgcgattgtagcgcgcgtacgcagttgcccctccgtcaggcggcagtttaatgtcccaagtaaagcagtaaaccatcaaaccgtattgtaggcctccatgctcgtcttctaattctgtagaaacattgccacccatcaatttgaattcgcaattttttgcattccctgctacaactttggttcccaatggcagcgttaaatctgatgcatcaacaatcgttttttggcctgatttcagtcgaatgaccccggggacatcaatatctaaattattcggtttaaagcgataaatagtagctgatccttcaaaaagggcctgataacggttatatgtgaacggctctcctatatttttaggattggtagtagcagtaagaagaaaagcgtcttcttcaacagctgcctgtctttccattttcatattaaaatggcttataacttgtccaacatctcctatttctgaatacattgaaatagttggaaccgtttcatatgcggtttgcttgcctgcgccacggagctctattttgccatcaccaattgaaactgttctgtagatttcattataggaatcaccaggatcaaaaaactttccttgttcctgcgttattttcccagaactaacaatcaatttgttgtaaacataatgagagtctctggtgtactggtaaatcttatcgccttcgatatagtattcggcatcttctgattgtgtcagcgcctcgaaacgggccccttttatggtcaccccctcaatcgtgataccttttaacgtcccgacatttattttgtccgctgaaaggtctttgatcttggcgtttgttattgaaccgtcaatgatgtgtaccgaatcaattattgcttcttttagatgcgcctttgcgatagccgcattttgaatagccgctgtcccgatagccgcttcagctactttcgcacttgttatggctgcattttttatatgagctgtttctattaccgccttttggaggtggtcgccatcaataacaccatcaaccagctgagtatcaaacgggctataaccataatcagaaatgacatcgcctttgcgcacctgtaccttacgaataacaaagctacagggctcagtgtttccgtttcgattatatccgccgattccaattgtgtaatcagagccggtttccggagcagtaaatttgatattaacccttataaattggtcagacggaaaagcagaaatatctttctgttcatcgctgctaatctgtatgaaagtgctgccttttttcaaatgaatataacttatgtcggtggtattattccgttttatttcaaatgacagtgtatattgttgatctttgatcaatgccattctttgaatattaacaggcgatgacctgttcccgcatattccgaaagctattctagttgttccattgatgatctgagaaacagtcatttcattaaattctttttcctcaacactgtggctggtgtccgtataatcatagaaccatttagattttaaaagagagccaggtaagatattagcatcatcaaagtttcttgaaagtttatcagcatcaacggccagctgggccagtttttcctttgtgatcgctccgaaaacaatgtcatcagtcaaaatgcgctgagtggtcgcggaaaactgatccgtgaattcgctcgctgtgcctcgtgtgttgattgagcgcaagcgataataccaaacttcatttactcccgtaaaatgctcatatccgcctgttttgcctctgaaaatacgattctcttttaatggagtgaatccatttacttgtgaagcatatacctcataggctgcaatataactggacggatcataatcccatgtcagggccacattctgaaacattgccttgatcactacattcgacggaactggcggggctttgtcagggaaacttccatccgtaacctccccggcatccggtttgctttcccaagtaccgcggtttttttctatcacgctttcaatttgatcaatccggccgtctttttgtaatgctgataaaaattggccgatctcaacaacgcaagtattttcagggtcggtaatatcgtattccattgaaataatgcgctgcgatgtctcgattgggatagcgaagtttcgatcaattgcgatcgttgtatctcccaattccacatgttcgtgttcgtgtcccggcacgctctcaagcagctgcacagacaactcataattgatttctgtcttacatgcagtcgttatcaaatgattatatgtggcctttaaaagctcttccggctccgttatgtcttcatcattgtattggccttccctatggatcaactttccatctttaaggcgccccaatcgttctaataaatccggatcgccaacccattcctggcctaaaggcttatcgaccgggtcgccttttgattttttccattctacttcagagaaatcaataaaacgagaatagccgcccgtttcctctccttcctcatccgtagatgctatggatgccccgtaaccccaaagggctgtcaccgggtaactgataacagtccgccggatattcgttgtatccttatcactctcaaagcgcttcccgctgtctttaccgcgacggggaagtatttttatgattcgtttgacgaccttatttccatcaaattctatagtgtcctgaagctctccgccccatatattgatcacgtcagcaatacaatccaacgctgtttttttatagaaggtagtcgaattcactccaagctccgccgttacttccgccacccatcttgaccgagaaaggacgttgtccagtacaaactgagcagttttgttagttgggcggaaatcttttacaaatgtttcggcaagctccatcatggcagcctcacaggtaacctgggtgttaacctctccttcttcgtctgcatcatccagttccttgatgacaaacagacgcattacaccgtccttatccttgaataccacttgattctcttcgaataggaagcgcgcatcagggtgggaggcatcggctacaaaagaaaaagaagagcccttgttgagctcttctttgtatttcgcatcccagaacgtacaggtttctcgtccgtggctggacagcactgtcaataatttatcatctggtgaaagtatataaatgtcagccatgaccggacctccttacaaatatgcctcattaaatttgatgctgctcttatgactgaacttgattttaactggcgtcctaggcggcagcagaaaccaatctgattgaatttgaagtgctgtcatgattaaattaccgctgcaagtgacttttctttttgcagaatcaattacaagtgtgtcaccagcgatgaaatcgtacagcagcttgatcgttttcgatacagacccatcaccattaagaagagccacttcatatgaagtggctttctcttcaaagacgcattcgattgtcgggtctacggccgcatagcccggattagtgatagtctgaatacctgaattaaattcaaaatccttcgccgggccgtatttttttggatcaggacagataaaagtcaatgttgcagtctgaaagcctccctgttcttcgccttctgaaatgctttcaaagacagcattatagactctgtcaggctcatcgtgaaaaattaacggtttaggttcttcggtgtgcagaataaaagtcagttcctcctgctttttcttcagctcttcttcactgctgaaagcaaaaagaacctcaacggttatgactcttacaggaattcttgtgttccgcaggaaaccgccggggcgattcccgatagtggctgtattcacttctcttccggtcactccccggccgcccgtggacttcacataaaagaagggtgatatatcaatgccgtcaaacgtgattttccattgattaggcagcagttcctgataattgatcaattaaatctcgtcctccttgcgttcgaccttttctgagcgtctgtgaccggtttttctacgccttgaccgaccttcttgctgtccatctcaacaacaatcatcctgtcaggcaattcaaggttccggatgtccgcgctcaattcttttctaaccgtgccgagttcgctgctggaaatggatgtgtcatatgcaaaattcagatcctcctgctgaatagtcatggcatcactgacgacgcccatagctttctgaacagtgccgataccattctgaatccccacagcgataccggcaggaaccatgaccccgacctgatcccgcatcaatctggatggggaatggattttcaatttcttcttaatcgttttttcaattgtcgaggcgatggaatttgcttctttcgccagctcgcccttcatattcttcattccagaaataatgccggccattgtatttgaaccgatggcttttccgcttttcttgagagaaccaagctgttttacatccactgtaagctccccaattttgcggagatagtcatttttcaaaagtgccagttctttatttgcggcagaccgtaattcatttattttcttggtcgtcgcgttcttcaacccggttaattcttgagcagcctggtcactggccagcttgtgcttttctttccacagactgacatactcatttagctctgaatctgtcatgcgggctattgcattaatctgatcagctgacccgacacccatttctttcaattcgtctgtgaatgcctttggtgcccggcttgctatttttgtaatgtcagtgttgaacgttttgatcttgtccagctgctttttaagatttgaagtcagcttggagccgttcacattttgacttgagacatcgtcaaatagaccgatggcgttataaatcgcgtcagttcggtcttgcagctcctttttataggcatcgttggccgccttaatatcggcagtcagtttatcattcacttttttgaattttgagagataagtattgtttgcagaaagaatgcccttgttaagtttgtcagccgctttcttttcggcttccttctgctttctggccttatcagtcatagctttttgagtctgatagatttcccgttgaacctttatttgctggtcagaattcagcttgttcttcttcttgattttctcaagcgttttgatataggtattcccgctgatttttcctgtatcgtattttgcctcagctttcttaatctgatctgatactttcttggtatacgccagtttcgccttcgcttccttgcgctgctgctctttcagtagcttcttctgtttatcagaggcgcttttggatgcctgatatatctcgcgctggatttttcggttttgctcactggtcagcttgttttgcttctgaatcttctgcaatgttttgatatacgtatcggcgcccattttcttggtgtcatacttcacttcagcgttcttaattttgttggatacctttacctcagccgccttctgagccgctttcgctgcttttgccgcagccgcttttacttttccctgtgatttatcaatacctgccgccataccggtgccgacgtgataaccgacctggtcacgcattacccttgacggtgaatggattcccagaagctttttcatgccgttaggaattgcgtttgccattgatttaactttgctcgctaatgcacccgccatgccgctgataccatttattaagccttgtatgatgttgcggccaatggacttgaggttgatgcctctaaaaaatttcatgacactattccaaatgctgacgatacgttcttttgttgcttggatacggtttacgatttgcgctttcatgtaactaaatgctgtagaagccgcgcctttaatgccgttccaaatggacatcactttgcttttcactgtattccagaggcttattactctgtctctcgtcgctacaattctattgacgatttgcgcccgcatgtagttgaaggctgttacagctgcactttttaaagcattccagacagatgtcactttgctttttatcgcgttccacaaactgaccattttgtctctggttgcaataatccgattcacaatttgtgcgcgcatataggtgaaagcagtcactgcagcacttttcagagcattccatatggacgagactttactcttaattgcattccagatgctgatcattttatctctcgtcgcaatgatcctgttaacgatctgggcccgcatatacgtaaaggctgtgacagccgccgatttgagacctgaccaaattgatgtaacggtgttcttaatgccgttccatattgaagtcgcagtctttttaatcccattccagacagaagaggcaaacgattttatagcattccaaactgttgtgaaaatggttttgtacagattgaattcccacttaaaaaaagcagatagcccgttccaaatggttttagcagccgaaacaattccattccaaacagtggagaagaacgacgttattgcgttccatgttgatgttgccgctgttttaatgccttcccatacagattggagccactgagatatgacaccccaaacttgaagggtgtactgcttgaccttatcccaattggcaataatgagaacaactaaggctataaccgccgccgtaatccacccgataggccccattgcgatgacccatgatgctgccatgcgcgccgcatttgccgctgcttgagccgccagaatgaccaagcgtttaccaaataagatcatttgcttaattcctgccgccaacattgacacaaatgaactgatttttgccgcagtccacgccgctgccatacgtgttgcttgggctgctgattttgctgctaaaacagttattctggcaatgaaaagtcccatctgcttaatgccgtttttcagcattgttataaaagaaccgattttcatcgcagtccatgatgctgccattttcacagcattagctgttgcttttgctgccataacggtatatctcgcaatgaattgccctatagtaactatcgctgattttaattgggtgatcaatccggccattctaattccggatgcggcagaactgaaactccgaatatatcgagcagcagtcataaagtctttaagcccatttgttacagcactgactgctactatcgccggaacaatagctcttaaagcaccgattaatgaaatacccgccgcaatgaacttcccgattgccgggtttgcttccatcgccgcattagtaaatttcaaaaacccgtttacattctccaaaatcgttttgcctagtggagccatgccaacaagcaagttgatgatagttttcgcgatctgccccaatgtgctccatactgtagggccgttggttttaatatagtcaatgaacgattgaaattcttttgttttcgtaacgctgccagcccactcattgaaccgcttggtcaggtctacgagggatgtcatcatgtcttgagacataggagcgaatccagtaaacagctttgtcaggccgcccgaaaagtttctgataatctgcaacaattttgggccgttggtttttgtatactccacgaaagcctggaatttctttgaggagcctaagttcgctgaccatttcacccatgattgcgtcattccttcgatagactttgtcatgctctttccggtcggtccgaatgctacgatgagattgaaaactgtccgcaagacattcccggcagatcggccgaatgaagcaaacgccttcggagcttctttgttcagataggaaatgaatctctgcatgtccggagccttgaaagccttgtccatgctttttgccagtcccacgccctctttcgccagcccgtcaaacattggaatcagtgagttaagcgcgagtttgaacgtattaagagacataccgaatgtttttaagatcggcttttgaaccatcgtaccgatgtcccgccagttgtctttaaagtcttcgaggttctttaatgcctctctctcttcttttccaagagatttttgcagattattgatctgtttcatgattttagcgcgctcttttgcgcttgttgcattgtccagcttctcctgtagcttggaaaggtcttcggatgctttgaatacaccgcttatcgaagtaatagcaagggcgccgaatgccgccgcgcctgttcccgctgttgcaaatgcactggttaaccccattactccgccggctgccactccgagcatagggcccaatgagccgattgctccgacaatacttgcaagggctggcgagattgcaggaagtagggacgttaatgccccggcaattgaatgaccgatgaccgttgaaactgagtttgtgatcttggcaagcctgttcattgacgtttcaaaccgatcaattcgagcttctatactaatccatactcttctcggcaaggacgccagagcagcgcgtgccgttgccacagagcgcataagcgcagccgtgtttccgtttatgaccgtggtaattctgtttggcagtgaagccaaagctgaacggacagccgaaaccccgcgcatgataggcgacgtggccgcattaaaagtggtagttacgttatgagatactgatgctatggctgaccgcgcaacagcgacagcacgccctaaaggagtgggatttccgtctatcgtcgttgtgattctgttcgccaccgccgatagccctgctttagcgcgtgccaatgcggaagataacggccgcacattccccattaattgcgtggtgacagtttggggaatctgtcttaatctttgcttcgcccaattgatggcccgagttaaagggtctgaatccgcatctaaatcaactcgcgtgcgttgatgtcgatgaacaaagttatctatttgttgcgccgcctgccgtactcttgcctgaaagctggcaatctcggcgtcaacctcgactgtgtgatgatcagccatccggcgcattatatcgttgacacgatccatactgcgattaaattttcttgtctgtgcttcaactattgctgtcagtctttcgatcattccctcaccccattccttgtccgaattttgcaaagtggttgcggattgcatcattaaaccgctgaacccctttggctcgtttgccgagctcgtttacatctgacttgcgccatttgtcgttatcgccagtgatattgcgctccaattggcgtctggccttcttcgcatcaaacattttcgtttctttggggcgcttctcattcatggcgtaacgatgaaacatggcgtttcttgccataagctccaattcatctatttctcgcaacttggctcctttgagcagaagcttgtactcgttaggagtccatgacatgattaaatccacatcataaaccccgagccaatgtgcggagttcgtaattatttggtcgtagtcgatcccgttctctctttgtatgcctctttcatcatcttcaagacttccttgccgttctcttcgtcctccaaccgtttcgcttccatttccggtgtttcgttcggagctggtttcttccctttgttcatcttctccatcatcttccaacgctgacggattacgcctttgaaaaaacccgctgaatccagtgttgtgaatgcttcattgatcatcttgtcaattgcgtcgcctgtctcgtcttcatcaatgattttcatgattgcttcttcaatagcctcagttgatggcttttctttcttcaagtaagcgagtgcacaatcccaaaaagcagaaagataggaagcctcttcgttgagcagactcatgtaaatattcattgtgccgcctttgcccttttcgtccgcagtggaatatttttcgtttgccaatctgtcaaaagcaaagtcgcagcgtgatttgtattctttatctccgatagttaagtaagccatttataaaacctccgattatttttgtatgttaaaaaagagcccgggaagcccggaccctatgattccttttctgttcgtatcgtaaaattggccgatcgttccgattccccagccgagttcactgccgacacattaaaaatgtaggcagtgtccggcttcaggttaggattcgacgtgtacgaattctttgagacagtcgctatttttgcataaaacctgtaaatattgtaagatgtcgcccctttcaccgcatcccatgaaaaactcacctgatttgaagtggcgcttttcgcagttatattgcggggaacgttagggcgtaaccgcttgtgtttgcgtaacaatctcagtcattgaggactcacccgcatcgttcacagcagagacgttgaccgtgagtttcgtatcggccgcaattcctgtcaaggtgtgggatgtgccagtgacagttgcgtccagctgcttgctcgctcccctgtataccttatatgaagttgccccatctaccgcatcccatttcacggtcacgctgtcagctgtagccgtgaacgatagattttggggcgcattagggcgtagttgtttttttggcattctcgccaaactgcatgaactctttggcaccggcagaagatctgatctcgtcaattaattcttgaggcagaggatcaagttcacctttacgggtcttaccgagaacaggcaatgttgttgaaacctcaataaacccatcttgcggtgcacttttttctaagttctcgatgattgcatgtccatattcagaatcatgcttatcgtttttgtttttattcaggtttactttccatacctgaactgtctcttcgttgtcataagcatcttcaatcgccgtttgacccggatcagagacagcagcatagtatgtcagttcgatgctctcagatttagggccgtacccaacaattcggccagactttgttgattcatcttttgtatcttgttctttcgtatgactgccttctgtttggaatgcgataaacagaccttcagttgaagtagcattcatcggttgaacaaagtaaacctcatcaataccattcaataaatctgccattttgttcatcctctcaattgtttattgtgaagcgcattctgagaatgccgtgacgcgtgtacccgtcaatatcggtgatcacctgcatgctgcgcaactcagaacggcataaagaaaagccctctattgttaggggcctgcttgttaacgcttgaagcatgaggctcaaaatctccatcgcttctttttttccgttgtaacctgaccagcagtgtaaaaccacattgatttcttcaccgctggatgtcttggttttaaatggggatacatcatcatcgcccattgtcacataaggcttttgctgatctttcgggactgcatcaaagacgcccgtgacgcgcccgttcagctcttcgtctgttgataacctcttaaataaagcagcctgcaacggccacagggcagatcgcatgatgacagctcctttctatcacatttgactggcaaaataccgcatgccttcgtccaccgctggattccagaacggctgtgcccgcattccccgcgtgaccacccatctattaagcttggtgtcataataaacccacggcgtttgccggccgccgccttcctctgcgtaaatccctgttccgtattccacatatacggcataatcggcaccaacagaaataacggcccgtaagccgccctcttggtagtcgatttcaattgaatttttcaagttcccccgtctattgcggcggtcggagcattcagaacagcgtggctgtaaatcagctcggccgtgtctgtgaccagttgcttaatatcatctatgacccggcttctgaactcgcttgtggctctttgcatctgcctgacccatctaccactgacctcagccattgcccttcagcacccccgtaacctgacatttcaaattcataatctcatgcatgccgccctggtcgatcggatctgatttgagagtcagcaccttgttctcgtagatgatccgcattgtcttctcaatatcattgcgatacgggaaatacacattgaaatcaaccgggttctgaagctgctgagcctgataatattcccgggacgtaatcccgccgacaaaggcctctattgtgagataatcagtgaatttttcaacatagcccccgccgccgtccggcacctcttcccaacgctgaaatgtaacgatatgcgggaattcttcatagatcatatgactctcagctttctgtatggagcaagaagcttcgtaatgctgcttggcagctctgtttcataagaatatgagacatctcccatacttcggcctgaaaggttggaaggagtcatgttatgctcgatcgctttcgcgacatacagctttacccctgctggtaatttttcatctccattgaccatgaatgagttgttgcaccagtctttcgcttgatctatgaacagaggtaggacctcggccagataggtatcgtggctgtctgtttttatgccaagcatattttttacggtttgaacatccatagaatcacctacacttcaccgagaacaattttgatcagttcctctttaggcgctttgggatcaaattcatattcgttctccttaagaaaggcaacgatttcatccttattcacctttttcaattgctcttcagtcatatcaagaaggtttgtacccggccgttcattcagctctttagattgtttggcctcatccactctcttaaaaccaatgtgagaataaaccacctcaaaagccttttcagtgcattcaatagttttggaaccgttagatgctttcatatcacgcgccgcctccttccagtgcttttatccgattctctaaatcagatagtttggctttcacatcgtcaccgagtttagctaaagtaactgccttggcaccgatgttggcattttgtacactaccagtgccgatgttacgattttggacagaacagtcaccgatattgatgtttttcacttctccgtcgccgatcatttccgaagtgatagttttaggagcaggcgcagaacccgataacccagtcaccttcgcaccctcttttatttcgagctcgccgccgatcaccaatttgtcgccgttattagtgctatagtttttagatgtgtaccccataagcttacgcctccgttgctggtgtaatagcagcaaaagcatcatcggtcagtgtcatgaatccgacttgctgagttacacggagagcaaccatatctctctcatacaagttgatcgggtttccgtctgcatcgacaatcgttgtcaatgttgcatcctctgagattttgtattccatgccttgagggattccgtaacgtgtgtaattccagtcagccgcaagtaatgccgctttttcgtaatcccatgacttagaatccacatatccgatcggaaggccaagggcttgttgtgtggcgccgcctgtcgcatcgttgaagatcggaaggccgttaccgtccttagtgccgcggagcttttgacggaatcggcgtgttgttgtaaagccgtttacatctttgtcagcgtcttcaacaagagccatgaccccgtttaactcatcatatagattgccaagtgagtttaacgcaattgtgttaccagattccttgattttttcaaatacagatacgccttttccaaacggtgaatctacaccgaataacgcagcctgatcaaatttgatcgcaaaggcttcagcgatagcagggcgcatttgtgtgaagaaatctgttacagagtagcgcaagaattctttagaaacagggatgatgacacccaatttctttgaaatcatttttgctgttaaccattgagccttagaagtttggattctctcgccttctccaacccagtaagctcccggtccagaagccaagtacgtgaattccttctccggcttactcatttcttcatattttgctagttttgtgacagcagattgggtcataaactcttttaaaaccagcgttccttgttcggttggaaccttcccatttactgagtcttgcattaatgcattgtttggattaaatgttggcattaaaaatagccctccttattttctaatacttgcttcagctgcaagcgagctgatgtctaaatcttgatttgtcggttcattgctaccggactggacatcacggccattctcttgaaacttggattcaatagccttttgaagtgcagcattgtacttctcttcgaatgctccgaggttcttcatcgttgattcttcatcctcaccgataaagaattccactacatctgccggcagttgcttttcagaagcataagaaacagctttgtttaaaagcttttcacgttgtgccgctgtcttttgatcttccagctccttttcgagcttcctgatccgcttctgctcttctgtttcttctggataaagctcttttacctttgcatcaatcagagcatcgaggttgttcgccttccacgtatcaagaccttttgtaaaatgagaatccaaccgaggctgaatgagacgttttccttcttctgtatctaaaaacccattcaccttgtcagcagacacggcagaaagttcattcagatacgcctttacatcttcgttttctttattttcttcgagaaattttttcacatcttctaaagttggcattacgcttcttcctccttcgccctctacagtgcgcgcctgttatgagtgcatgaaaaataagccttttaacgtcatgctcaggacaaaataaaaagccgctgtttaacgtcttcccttttcctcaatggatttgtaccactcttcataggtttggtatggaattgtttggcctgccccactgccgccttccctcgcccttctcgtatccggcagcacaccgtttactttaaaagcaatcgtacaacggcaatttatgtcatctttcgcattattcatgtgccccggagccggcccgactccgccgtaaattgatttgaacagcccattgcgttctattgtcttcccgtccagtttcctgtgcccggctcgtgttttaagatcaagagtagcattccacatctttttaaggttgctccgttttgaggccttctcagcgctttccatcctcgccgagacttgtaccctatgagcttctgttctcgccacgtcacgggctttcctgcgggcaaattcggtcgctctttcaatgcggcgggcgatcttggaataatcctcccccgcttgtaggccctgtgcgacggaaatttgaatctgccggacataatcgtctcgatgccgcctgtaaatagctgacaaagtcaattcagctatagggtttagaatggcctgccgaatgacttcggctgtcgggatgctaaaacccaagttaaccacggattccatttcaaatagataagcagaacgcatataattctctaaaaactgcttggctgctaatgcctcaacaatagtcagaatggttttgaaagccttgtgagattcctcggccatcctctccatttccttgttcagacgattgtatttgttggcatcggctaaagtaagctggccgtccttgctgtacttcgcatacagccgggcaatttgtgcgttgatctcctttaagcgagacgcaaaaacgacatcaatcttctgagcatcctcagtgatcatgtcgtccaggtacttatcaatatcattctggttcatcttcatcaccgcccgcgtctgtttccacatccgttaacggcggcatgttgagcctgtattcctcttcttcctcttccatcttcttcagctcatactggacatcatcaacaaacgacagcagagataggcgagtttcttcgcttaccattcctttaagttgccctgtcgtttgtgcttcttccagtacatttgccggaaggtttcgcttaaatccgaaccaaacttttttataatcttccgctgccgctttccttttagtgccccatgcggaaaagatcagtttgtattgataacgcagagcagcagtcattttccgctccatcgtgatgcatttgttttcaagcgacatcaatttatatttcatcgcaacccctgaaacattcccaccaaaagattcatcggagaaattgaccgattttgcaaagcgaaggatattctcttccaacctatcaagatggttttctatgatggcatcgtttatatcctttgtcagatagcttacgtcatctttttcgtcaagcaattcaaggactccggtctttttgagctggtcaagcgtctcttcatcagcgcccaacccttttaaaatcaggtatgccagccgatattgctcaatctcattcgatgcatcggacaacgtgcggtcatacgcatcaattaacgaaagaaccttttcagcatctccctttagttccttgttattcgctaaaccgaataaggggcagccatcaaaaagatgcaatgtttttttatcaaaagtgaaggctgagctgtctttcgtactgaaataatagacatatttctgatcatagaattctgctttgatctttccgccgtacaccgtgtaatatcgcaaagcataagcaggttcatggatacttccatcagtaataaaggcgcattcccatggatcaatattttttatacgctcgtttccagaacgatcaacgtaagcgaggcgggcgccgtaaccgcaaatagaggccattttcccccactcgctgtcttcatcagcaatgttattttccatattaaaattttcgatcaactgttttacaggtattgcagtgcttgtcgtatcgctctcatcaaactcatatgcaatagggtggccgaacaaatagcccacctttgtatcaatgatttcagagtcaaacgagttgttaagcctattgtttactttgtgatcaatacgttttaattttcctgtttcaaaatcttcgtattcaatggcttctctggataagatcggaacgccttgaacctcagcctcgtaccgttcataaagctttttcattctgtcatgatccggcttatgttcctgaatgatcttgtcaatcaattcaggcgttatgccggactgttcaatcatgtctataaaatgattcatcagctcacccctctccgtcttttcggtttattatgcgaatacagagcgtaccggagtgagtccagcacgtcgtcccattccttaaccggttcgcctgtcttctgattccagacgtacataaagatttcttttttgaaccggtcaactttgtcttcaacaacaaaaagctgttcttgtttgaacagccgcgctacttcttctataccggatacgacagctttatcagcgttaatagcccgaagtttttcacgccggaaacgaacaacgtgttctggtcgtgccgtatcacaatagaaattaatgtttccgtaccgctcttttacgcctttcgctaccttcacccagtaatgaatttcctcatgttgcttggcatattcttcgagcaaataaaaacacccctggtcatcttgtccgattacaacaatagaacccgggtgctcatatccccagtcaacgcccgcaaaatacttcttgaaattgacgcgcctgttttccaattcctcagagctgatatagtggatgtccttattgaaatccttgtatatgactccttctggcgccacccaataaccgtgtatatcccgatctgtaaacatgccgctcggcgttgatgccacgatgctctccacatattccggatcgagaaaattgttgtcgaacagcgagaaatgaaatgacctgatgttcagccgcccgcttttcagcatttgcccgtctttgtcgatataatccgttttgacggtgtgcatcgggttttcgggatttgtatccatcatgaccacagcgcctttatacgagcaccgggaaatgacttctttcacgaatgaatcgtgcagggcagtcgcttcgtttaggaatgcgccggctgatgtgaacccccgcgcttttttccatgaatcagcattggctccatcaaagcaatatacacggttgccgaatatttcaacggcattcgacttgtcgagcctcaattctttacccagaatcagttccatatcgttcaagacatttcgttttatggctgcctgagtagccccgccgatgatgaaggataaacccatattttgatacttactgacgtgagcaaggaacgtcaaaaggagcacgaatgtttttcctgccctctttgcgccgctacaaattagaattttgggttgctctttaataaagctgtcccaaacttccttttgctttttattcagttccatcggcattcaccatttttctcaacattgcagcaatatcattttcttgggtgtttccatcgccgccattaacggtcttcttcgttttctcgatattcaagcgcatctgttccaatttaagacgccgctcatcttgctcatgcgccagctggtcaaattgcttgatcaagctccggagctcccccattgcccgagattgagcgtttaagagagtcgcatgacgatcccaagcgaactgtatttcaagttcttcttctacaatgtttttttcatatgttagattgccatcttcgtcctcatcttgatgataagcgtattttgcctttttaagctcttttgccgtatcatctttattctgcacaaacataatgcgctgcgcccgaataatagccgcatattgtatctgaatctgatcccatatcatatcagcaggggaacgctcctgaatctcttccatgatttcaagcgtttcttccggcagatactttgagaagaacccatgtgatacagcattttgatttcttgccggagccgccccgccgctatttcctaatgcgtttttgttgccgggttgcccgcctatttttgtgtgcacacttttttcggtgggtgcaccctttttcctttcccaaccatgccgctgcttccacgatttgatggtgttcactgacaccccgtatttttcggcaaggtccttgtatttcacgcctttgacgtaatccttatacgcctgaatgtgcttttcaaccatctacattcaccgccgcccccttctgattcgtgtttgttttggaaaatatattccctctaaaccgacgccgcactcagaccgttaaccacctatagttttcctgagacttaccggaaccggtttacaaggaacaaaaaaagcacccttaaaggtgcaggtgctggctttcatttgattctatttctttcataagcgaaaatataatatcagccttaattatataattcattggatacttaataactggttgctcctctttctcacaatttatatagtttactatttgagctgtattaataccaaccaccttattattataaataatggggccgccgctaaaacctccataactaaacatattgcccataaaatagtttaaatggttatggaacaaagacactttgccaaatgaataaataggaagatgctgatttgttaacataggattgacgacacctaaatcagaaaagtcaggataccctatcaaacatagatcatctcctggcgttaactttttatcagaaatgtgtttaaaatccaaaggtgtataatcggatgattctaaatttctcttaaattcaattgtctcattaaaattaagtgatataatagccaagtccatctcaaagtgattattttcataaactacaggcgcctctccagactcaccagatcctaatcgatatatttgatcgacccctacagttttgagattctcagcatatttgtttgctttgtttatagattcatggagctttcctgaatttctattcacaattagatgcttcacagtaataagatattgcttattaccttttttcacataaagagcagtaccaaagtcttgtttatcttcactgtaacattttaaatgaacaattgatttttctattcttttcaaatccatatttctctcaccacttctagaattaatctgaataatataatatgaacaaaagtaacttaatgaaacctatccttttttcttctgtttacttgccttccaatccatatactcatggaatactgtaggtcctgtcacatcgtattttctaccaatccgccacaactcatcttgcatatctttttcaatatcttcccatgatctatgcccttgtttctctaaaaaatcattaaattcttttaccattggcatcatattctcacctcccaccttattatcggttaaggagtgtgataaaggaactatttgcaaaatttgtcgaacgaaagcacttttcataaataggtggcaaccgtaagacaaaaaaacacccttttaacagggtgctcatttccgcctatgtttttggaaatctaaaatatcctctttcagaaaaagcctgtcccggggcatttctttcatcggctctaattccccggtctttactaactggttcagatactgacgggtgaaccccaatatctcaagcgcctcacttgtattgagtatctcttcattcaggaatttcttgattgcgtcacgctctttaggcttgtacatttttgaatcatccttttttctcacgatatttcaagtaaagggaaaatgctttctcgatgatcgaaacaacaaataaaatgatcagactaatgtcgagagccgttttcaacggtcccgctgccacatcctgacggaaaaacagcatatacgccagggcgagaagaacaacaatatcagtagtggactgtacacttttcatttttttgaaagtggctggctttcaagtatttttctttagtcgccgcatttgctatacttggagcaagggagaagcgctaccttctccctcggctcaaaatcatctgcgctttcttggacgtctgcgttttttgattttgggcttttttgctttaagcttttccctgatgatgaggactttctcaacaactgtgagagttgtgaggataatccccagtaccaatgcgatttcagccactttctttccctcctttctatacattaattatacatcgtttatttactcacgtcaagtaatttagtgggcttttttcattatttctccaataaaaaagagcctattcacgctaaacagaataggctgtgatctgctctatttttcattttcaggcgggaacgttcgatgttcttctgcacagttccttttttaatccccaataactgcgctatctcttcgaatgacatgttttgtacagcatgcatcatgaaaatgtctttttctctttcggtaagcacggatagggcatcagcgattctttccttatcccaatcacttacttctccctcagcttcttgaacgattgcgtattcttccggcagcgcatcaattaagcgaggttcagcaagaatcgtcctttgatatgcgtctcttctgtcagcacctcggcgtgcgcccggctgtcttccgttctgcagccattcaagagtgaattcaatatcgctgatcatgctactgataatctttttgtcgttgatctgttcagccgtcagattgacttcagccgtatctttgtagagccgatacatttttcttgtttctcttaaagctcgtttgtactcaatgattaaatcttgcattctgattcctccctttatttgcgcttaaatgcgccgcccttgcctcgtttaagtgtttgcatgtttgtgttcatcatttgttgccagaaacgatctgagcgctcctgcatgtttttattgggctttttctttttctgcttcatgtcatccctccgttcaaataaaaaacggacaccaatcagagcacagtgattctgtgcaatgatcagtgtccgcaggctttccgtcttggacttattcagttaaagcagcacatatgtagcaatgttcccgatgatcgctactatacaaattgcagttaagtgatttcttagctgtgaatccttatcctctcctataactcccataagagagactatcaggaccagcaagagagctattttaaaggctattaacatctctctcctcctaattaagacccatttgattcattccggatttaacagctagaggcaccacgtccgccggctccacatatggattcttcttgtattcctgatagtaagccacaatcagctttgacgtatggctaacaagctgcagttgtaaaggcatacccttttttaattcatcaacaatcatttgaagttcaatctcagaaaatccgttcatttgtcttccctcttctctatatacttatcaatatcttgaaaaaacgccgcggccgtgaatgcgatgattgcgcctattaacgtgatgtttgctttcatgtccggcctgtattcgtactggaaataaaaccagaaacctaaccccatcagcataaaaactattctcagcgccatcgaatcccccttatttgatttgaaattttgctgattcaaatgttccgatatagttccacttgccggaatcagagtagcagtccagctgaatgacataggtccctttcccggtcttattccggatcgttttcacgttgaatgatttcagaggcgttgccgttttgaagctgcctcgctgtaccagattcgtttcagtaagcccgccgccgctacgcttcttgtatacgccggccgtgtaataaagagtgcttgagccttttttctcggctttccagtccaccgttgaggcgccggccgtgtaagtcgcggcatccgtaaacacccggccgctgtacccggattcattttgccagccggaccatgctgcggaagcagacggcgcaacggccgcggctcccataagtaatacagctgatagaatgattgatttgaatagttttttcattattttccccttcctagttcacaaataattaacatttatttacaaggataatcattattttgctcgaattattactgtgttcaataaaaaacctaaggagtgtttaaaatgaatttcaaaaagactgctgttactgcactagcgattcctgtattagctttttccattagtggtatggcttccgctaaggagataactcctcaaaaaaatgaaacgcaaacaactatatctcctggtccaattaaagcctattacgatacctttgaagtgagagccgggggttctaaacaattagatgccaaatatttaggatcaggattcgcttatcattcagataatagcgctgttttcacagtagataccaatgggcttgtccgtggcaataaagctggaaatgcatatttaactatattcaaaaatggatcagtatacggtcagttacacgtatttgtctattaattttctaatagaagagcattctaatatgctcttctattttccacttcaccacctatgcagcgcccacaatgcgggcagcgggcatctgcgcggatttctaaatcaagttttttataatctcagtccgggcaatgatattcgatcatttactatccgcccattcatcaaagctgtaggggtaatcaacactttcaatgaaaccaatctccttcgccttctgacggattttcatacatccttcatagctgtaagcccatatttctttataatccctcagctcgccgcatttccctgttatgatgaattttctgaagctgttgaccagttgccacatgttgcccccatgcgaaaagccgtttgaactgccgtatcccaattcatacgggtaaacatcagcgcccgtgtaatcatcaacgaagaacagttttttcttaaatctgaaatacgctatgcgatcctttgacttgcggtagaatgtacgatgatcaatgcttgcgataagcttgatcaaatcgtttatgtcgttcattcgtttcaattgctctgctgttggcattgggttccctcctgatcaaataagctgagttgtgtgattttatagttaaatagcaataattcttcagccccgcggctttttccggatccgccgacaacctgtttgtatgcggaaaaggtttctgactcccagttcgggtagatctcgagtatcaaaggatcatcgtaataagaaagaaccactttccctttgacctgattaagcagccgggccagttcccgatgatcctcttcgttaaagccgccagcataaaaccgttcacgcccaacatatggcggatccacataaaacaaagtatccgggctatcgtatttctcgatgatgttacgaaaatccttacattcgatcatgacgcccttcatacggttggcgaaagactcgaaggcagcgcaggcgcttatgtatccgccagcagggttctgcccgctttgtgtgctatgcctccagcctgtctgcggcacttcctccacgttccccttactaatgccggagcgattcatataaaaccacctgacagcccggtcaaaatcattttgcgggtaatcttcagttttccatttctcatagagcgcccggctgtacggaatggattcgcaagcctgctgcatggcctttggatcctttctgacttgcatcaagaaattcaccacatggccgtcaatgtcgttatacacttcatgtcccatttgcggcttattcgctatgacatgagccgcgccgccgaaaggctcgacgtacaccttatgggcgggcattttatttatgatgtgatcggcgtatcgacctttgccgccaaaccagattaacggtgagcgtgccatcccttaacccccgatcaaattcggcagcacggagatagcgaagaagaaaagccccacgcatgccccgaccagccagatatttgttttatcccgtttagcgataatggtatggtcaccgatcattttcagatcgtcagaccgagcgaccagcgtcgggatgtaatccgggtgaacctttaaaagctcggccgcctgctcgacggtcatcgcttcgtccttcgtggccttcacgttccgttgtagttcgacttgtaatggcatcattttgcagcaccgcctaacatttcgggattctgatgtacgttgccgattaactcaccatacatttgaacaaaatcccaacgtattccacccgcataaaatccggcatcatcttctgaccatttaacgactagattaaacacccggccgtgtgatttataacagataatatctcccgcatatatttctttttccataagctttttgcccgtccataaatcgcggctgatcaactcgtaaccaaactcttcacaaaagacgggagacagtttgcgcgccgggcgttcttcaagctgactgatatagtacgttttcaattcaacattgcctgtttccttatgtcggaatacgtatcggatttttatgttattcattccgcagccccctccaatgcttttctggccgtttgccctccgtcgagttcgacagcaggcggacagtcttcaaattcgtttgtatacgtcgtttcattggcgtaaaattctaatgcgtttctataacgcttgttctccgcctgtagcaacttaatatcttcctgagcctgccgaaactgaatgaccgtgacatcctgctggcgctggtgctcccgattcatagcctgttgcatgattaactcttccgcgagcttttcggctgctgcttctaaagatatttgctccggtgtactggccgccgttttcgaaagggtgcaaatgtaagagccggtatataaaacctcaccttttgacaagttgattttgaattctttcatgcccgggcctcccggtctaaaagacatgttttgcatacaacccattgagctgaataatatatttttccgcagcgttcacacttgcgggcaatttcgttttgatacattttccgttcctcccccgcaggggaaaacccctgctaattgaatttatggccgatctcgtaatcacaacgagccaggccgccttttattgtttgaatgattgttttaccgtgttccggggcgtccattagatgagcagtcccttcagtgccatctaaaacgatgatgcggactttccccggctcgatgctttgctgaatagttgtttcatgattttttatttctgtcggcttgttcactctggccgccccctgtgctatgatagaagtaccagttcatatcagagcatcggggccacggcttcggtgcttttttacgttttacgacggcagccgcatcgttactccggcagatggttttaattcctcgcggtaaatgatcggatgcttttcgatgtaagctgccaattgctccggcgtcattttccacttcttaactggaccaggcttgtatcggttgatttcttcttgcatagcgataacctcctgaattgatttagttctcaagcatcaaactttctccacaaagcgttatggcaggatttccgttataatgacttccacccggggctcttcactgtaaaacttgctaactttcagatcgactacctggctatcatcccggtaaatcagatgattcagggcgtctttaactccctttacatagttgtcaacgtccggctttgttacgggacgcaggagacccttttccgcattttctctttttgtcttggaattagaaatttctttcgtcattggtctgaatactctgacatccattgccacaggtcccgtaataacttgttttggccgatactgtgacgccaccagcgcaacatattgtttaaaattctttgatttcaaaggatcacgcattttaaccttgccatttataacagatcccctcggccttccctgtgcaacaggctcgccgtaaactataaactgaatggaatccaaccgtcattacctcccgtcaatttgttcccagtgctgaatctgcttttccttgtacggcgctgtgaggatgatggccggcagcagtataaccgctttaagcactgtgcatcagctccatttgtttgattttttcctcaagcacccggatcgccggggtaaggtcctggccggccgtttgctcagcaggcccgaacacgtacatgccgccggttgctgtgaagttcgctttttccgtcattcccaatctcctaacctatggtttaattgcatccgatcgcccttgatggtcactgtgtaatctctgcacatttgatgaatgcgggagcccagcgcctcgtctatgtccaaaatttcccccgtatcaagctcggaagagattagcagaggcttatgattcaggtaccgataattcacaaccgattgaatttgttccacttgccaatccgtcgcccgcggctccccctttactggtttgaataagtcatcaatgaacagaacttcagctttccgcatagcgtcgagctttgtttccagctgatcaaagtcatttcgcagatcgcccattccctcaacgtacgggaaatacatgcagtaaattgattttttcttaatcaggttgttcatgatcgccgttaacaagtgcgtttttccgctgcccggctgcccgagcaaagcgatactgtttgaacgttttcccttgatgctctgaaaatccttatagtattccaccgcgcactcataagcgtccttgatcatatccggcttcccgtccttaatgaagtttccaaaaaggagcttttcgaattcctccgtgatgccgctggccttcataagccgggcgatctttttccgcttcacacactcgcattgcttggaaaatgtggttttccattctcgggccttatccggcaagcatactttccccgcaagataatcctcttctctgaccatttgatcaggggccaggctttccattgtcttatgctcttttctcaattggcgctcggtgtcttggtgaatacggtaaacaataatgcccttatccttgcagtcagagcactcgtattcagccttttcttctgaggcggcctgtcccgttgaagatgctgctgaccgatcccggagcttggttagaattgccttcattgccgcgtccatatcttgcgttttgcgagcttccatactgctgtttctcctttcgtctctggctgaatgggtttgagaggatggcttcaatgtaattcagattgacgttgttgcccttgaatctgaaagcctgtttcattgcctccatgactttctcttcaccgtaatcatccaccatatatccgagccgctgaacctccatcgtgccaatggtgcgggctgttttgttttcgaatagttcaaatgcgtttttcattttttcgtcaacctcctgctgtcctaaaggtattggagccgggtctatcttcttgttgtaatttccaagctgtatgtactcggcataattcaacaccgtcacaatgaaaccgcgtttttgcggcagccggtccagcttcaaatactcttgctttaccatccgatctaacgagtatttgatctgatcagaagaccagttgaagcgcttggctaaatctacaagcttaatgattgtctgcccgagctttagttcttgatctgccctgtactccgcccgtttgaataaataatcgtatattgtctcgtctcgtgaatctttaaatggcagccggggcaggaccacataccccaaaccttgcatatccatgccgctcacctacttcctttcacacagtgctgtcagagccttgaaatctacttctactaatctcagagacggctcatttgtctttaagtagtcagtcgtgtaccgggtatacaagtcctttctcaagtcgcgctgaaccgttttgaccagccagagataacaatgcgggataggaatcctgatcagctccctttccatcagctcaccaactccgaaaaatggatgatgctgttcagttgattagtggcccggcaatacttgcatttttcgcatcgctctggtttctctccgccgtgtttcacttgcaaaatccgatccatccgctgctcaatctcttcaagctctatttccagcctgccctcatcaatattgatgacagctttatcaggtggatcttcttttgaaacccctacgatcaggggctcaagccattcgctccgtccagtcatccgtttttcaatctctgcgtaaagcgccatctgagcgatgtatccgtatgcctcaacaaaagagcaatatcctatttccgggtcccaaactttctcccgcaatgaccgcgctgttttcagatcggagaaacggccgccagctgggttgtatacgtccagctttcctttccacggaacaccgaacaattcagcagttacgatgacttccttttctccttgaagaacaaacatacagagatcatcattttgaatcgcctcaatcatcagatcagctaactgatactgcttgtacagctggcccttttgtgtaaaaagtgatggggtgttctttttaaattcatcaaaagcctgttcaccctcaagccaggcatgaacgtattggccgaagaggagcgcctccgatgtgggcggcgtccattctccgttcaactttgccatcgtggcagcctcgcattgcaaaaagcttttatattgagaatttgacatgtagtgtctatcaatctcgttagagtaataattcttcttgttcagcgccggtatccgcattagcaggatcacccgccttttctttactatcagcaggcttgtcagcttgctctttcagctttttgaattcttcttcagcctttgatttagtcgcgctagtggccttcacattgaagtaatcctctttctttgccatcccatcacgcagggccgtgtaaatacgaccaattttcaggaaatcttgctcagtgaaggcatcaacattactgccgatgtactcctgaatcatttccttagtgatgccaaactcttttttaaaaagggagaaggcacttctgagtcggtcttccagtggttccttatgtccactaatcaatgttttttgacacatatctaccgccgcatcaacgatgtcgcccggaatcactccaagtatgcaagcacgaacccggcgggctccttgattggcaaccatttcgtaaatatcccttggatcatcaagtttggtaatggcgccccgtgccttccgttcatgcttcacagtgaaaattttggtttgccgggtattcgtttcaagatcccaagcgtaagccatgacagatgattcaccggccttttgttccaactccataattccgtaatcaatgttcccccagttctgtgccaaggcctcagccagccggatggatgggccggaaacctttgtgccgccgcgcggatattcatataccgcattctcagccaatagcctccgctcgcatgcttttttaatccggtcaaaagccgcgtatacgtcccgtgggaatttctttgcgataaccattgccgcttgtacttcttgagcctgtcggcttaccatcgcttccatagtcacgccagtagcctgctggggcgccggcatgtaatctgagtaatccacctgtgataatccattcattgtgcttctgccacctttcttttatatgcttccgttccaagccgctgccattcccgatagtgatccattgaagggaaactaaactgcgctttaccgtttttggagaatacaattgagccgccgacctgccttaaacgtcgctgatcctccgcacgctcactgaatgccactttaactgctttagccatgtataaaacctccattgttttttatggggcgttttggtataataggaatacaatcaattatcaaaacgccttacctagtccactctgccaagtgggcttttttattgctcatttttaaattcaaaaccaagatgctccttcagataccgctcaaggttttccctcaagatgatttcaccctcagcactatctatcacgtaatcatcgaaagccgttacttcatccccaaagtaatccttttgcgtgtccggctcagtcagtttgtcatgccagttgttcaagaccatcggattttcaatattcattgtgaacacctacttacaacactcaggtgaatcccgcgggccgccatatttaagacagtttgatgtaagcgccctttattcgtcagccggtttatatcctctgtaagaaccttgatgctccctgcaagactgatagcttcttcataatcgccatcccgcaacgcctccgcaagcatgatagagagcctttccgccgactcgattttcctttttgctgaatctgcatctgctttaagaaactgattgattttcataccagcaccgcctgcctttcttctgttttcgccattgcaacctgactcattagcgctttccgcgtccacctttcggccagttccttcatgttcagtccatgactacgggccagcgaatatatcagcgttttatttgctgggatcagatcaaaaatctgctttatatcggccatgggcagttcttcaggttgtcggcctggcctatcgtttgccaaccagcgcgctaaatgccttgttgcttgtaatgcttcttcaagctggtgaatcatattgattaccgccgcgcttgcactctcgttaagtgctggatcaattggcgccgccgtcgtcgggtgcaatttgaagagataatgtaccagatcaatatgttcgtatgcctcgcacgcctcaaaccacttaatgcataattccggggtaagcttactgaatccattttcaacgtccgaaacatatcgctgatcctttccccctatcaaattaccgatctgatactgtgcaagtcctgccgctttgcggacactacgcatgatccggggtagattatgcaaattgtatgggttgttctccatatgtttgcctcctgatatatccagttgttcactggtaaaatttaattaatgaagggacaagctagtccttttctcgaacattaatctccccaaatttgtggagattgtttcaagctgtttctgatgaaatgaatttattcacaaaataaatctgaccttttcccgtaacctttggcgttcgggtagttctaattgaaccatcagggttattcattgttctcttcttaatttcaaagagacccaaatccatacttcgctgtgttggtagattgaaagactcgcctgtcttacgaattaaataaccattatcacggagccattgaaataacttgttaggtccaatctttacgccgttctgttgaatgattttcgctaactcgccaacaagcacagatgattcagatgcttccacggcttcggcgaaaagagcttttggcttcatagattcaatttgcttattttgctcctttagtgcgtgaagagttgttttgaaaaataatttggtattttcgtctgcgttggacaaatacgtctgaatgaactgttcatcatttgcgacatatcccccggtttttctgattgtgggtataacttcaaaggctaaccaatcttgaaattgttcggcaatttgattagatgctctaaaagccagcttgtacaccaatggttcaggaataaaatcacctttctctacttctggaaagttatccggaaggtaagtattcacacggctccatcggattgttacgttgccacttttggcaacggtagtgaggcctaagttccgagcaacttgctcggcatcaaaaaggatttgatcattctcaattttggctgcaacttcgaaaatttcatttttgaatgtttgtaaattattcatgccgaagctcctttctgatagtatgcggtgttctcagcaacccaacgcgtgttgctctcaatccatttaaaaagcaaagtcgtagggatttttttgccacattcttcgttaaccggaaaatccggacgggccatcagttccgccattttagtgggaccgcaccgcagcacctccatcgcttcagttctcgtcaagatgtgaggaagctcgttcaaagagctgagccgctctaccagcatgtctgttgctctatcagcaattttggcagctatctgttcaatgaatttctcatcgtattgcatagtgaacatataaaaaacctcctttacaatgagctttataatctctcactttcatgtggtaaaatatgcatggaaggtggtgagatttaatggcttctactaaggtttacgcttgcctttgtggtgaatgggttgacttgactagtgatccggactgcaaaataggtgaatctatgtcttctccatacatatggtgggaagaaggtgcttcaatttggagccctaattctaaagaagagcacacgatgtatcagcaagattacgttaatatttattacaaaaatgctgaatatcgcattcacccaatgtttatccaaatcaagtattcatcctaaattcacgtttaaggttagcttctaacagttctgggtcgtcaaactgcaatttggcggctttagaactgaacagtacatcgacatgttgtttaacacggctccactcggattgggacataccattcaacaaatttttaatttgttccagctttttttgatccataacttcgacctcctatactgtttttttgtaactttcattcctaagcagttttctcgttaccctttttgtgtaacttttcattaaaaaaaagctcatcgacttcttcattcagtaactcggatatttggtgtgctttttcaagacttggctttgtacgccccatttctatatttgcataaccgcttgcgtatctatagccaagcttttttgccataaaagtttgggtctttccttgagaaagtcttgtagcccgtaatttttctagcactattaactcaccaccttactcttttcgtgtaactcgttaaatacataataatatacacaataagggtaagtcaacatatttttattctttttgtgtaagtaattatctcttgtgtgtaaaccgtgttaaaatttacacaccaaataaaaaaaggtgtataataatggataatataacagggaaaatcttaactgaattaagagaaaagaaaggctggagcaaatctttcgtcgcaaaaaaattaggtattaaaacaatgtctacatatgcgaactgggaatacggtttaaggaaaccagatggagaaatgctcgttagacttgcaagtttgtatggtgtaacaactgattatctcctaactggcaaagaacctacttttaataatgacctttttgatgatcctgatctacagatcgcctttagagaagcgagtgacttctcagaagaaagacaaaaacaagcaattgattttataaagtacctcaaagagaaagaagaacgtgaaggccgtaagcctaaaaagtaactaactgccgaaacctttatttatattattgttattatgttatttctgtttactaataagatcaggattggatcgggattagaaccgaactggatcggaaaagaatttttcaccagtaggttgaagccaattatatcaagggaaatagaattctttctcatctggattgcatctggattcaaacgggatctgatcagaaaaaaatatactcaagtgtattacttataaaggggaaattaaatttgtcttttttgatggaaaatggcgaaatctataactgtcagtttaaaaaacgcatgaaggcttctaaaaatttcttgaaaacttatgaagcagctaaacctctgattgatgaaagaaatgaaacaattcatgaactcgtttgcggaactatgaagagtgacgcgacatgggggcattttattgctacagaaaatcaagtatatttcattgtcttgaaaaagaaaaaaccaattttaaagaattggccctataaagaaataattaaaattactgccagtcgcaagccattaattggacataagattgattttaaaacagccgaagaagacttaaacatcaattcaatatcagaaggtgatattgacggctttatcaaatatgttgaatcaaaaatctctggcaatgaggaaagatacgaaagtgaaaaagaggatttaaagaaagaaactaaagaatactattttaaatcagcaaaaacaacaatcacacttgatggaaactatataagagtagcaagaaaaggcgctgttaacactatcacacgagggtatagtggggagaaatcttatagaatcagtgaactgtccgggcttcaaataaaaaaacctggattagtaacctcaggctattttcaatttttaacgccagctgctaatgaaacaagtggactctgggacgcaatacaagacgataactccttcacttttggcgcaaatgaactgcctatggttttagaaattcaaaaatacatagaagaacatcagtctattccagctccaacaataccaccagctcctgcccctactgtatctgcagctgatgaattgaaaaaatataaagaattgttggatatggatgctatcactcaagaagaatatgaaattaaaaagaaacagctattgaatttatgacagcccttcttcctcgggcttttctttcacaccaaaaacagaacatacattccctacatggtggtgtttttaatgtcaatccagttatcgtatcttgaagaagaagtgaaaaaaatctattacaaattaaatattgagactcctgaagacattgatttagaaaggattgccgcggcatttcgtatctggctgcattatgagcaaagagaaagctgcatgtttcaaattaacggtgagtatagcgttgtccttgatgctcgagcctctccgcaagaacagtggcaagactttgttcatgagctagggcatgtgattaaacattgcggaaaccagttcaacatgaatcgtatgtttcgccagttgcaagagtatcaggctaatagctttatgtatcatttctgtgtacctagttttatgcttgaaaagatttcgttgccacgcatgaaatcagaggttataaaattaataggtgatacctttaatgttacatatcaatttgctgctaaacggctcgatatgtatacaagaaaacagttctcattcttgatgtataaacagctctttaaaactattcattgaaaaattggggtgacaaaatgtatacagaggaattgatcaagggtaaaaaatggctggctgttggtgacggacctcgtgatcccgttaccggtaaacgcaaacaaattgcgcggcgtggcaaaacaaaaaaagaagctgaacaaagagttagagatgctattgatgccttaaaagaagatggcattgatgaatcagttgttaaaaaaatgactttcgaaaagcttgctgccgaatggttgaacgaatatgctctcacaggaaagaaaaaagcaactctgcgtattcgaaggaaagaaattaacatcttaaaccggtatatcgctaaaatcaatatcgctcaggtaacaggaagaaaatatcaaaaaatactcaacgatctcactgatcaagaatatgcccgtaccaccattagtggtgtgcatacgacagccggaatgatttttaaatacgctgtaaaggtgaagcttttaaaagataatccagtggctggcgctgtagttcctaaaaagagaatgacagtagaagatattgaaagtagtaaaatagagcaaaaatatcttgaaagggaagaacttgaagagttcctcttagcagtaaaagtccatggtttggaaatggaccttgaacgattttacttgctcgcttttacaggcatgcgttcaggggaaatgtgcgccctcaaacttcctgatataaattttgaaacaaaagagctgcgtatcactaaaaccatatattccgaagataacaatatgagaaattatgaattaactccgccgaaaacagccggatcggtgcgaactatcactctcgacgatcagataatagatatattgaaggcacatgtaaccaaacaaaagaagttgcgcctacagtccaggattgatccaagcgaataccacgacggtaatttcctatttgctcgtgagaatggctatccctttttaccaaaaaatatcattgtaagaatggaaagaatactggaaaaaacatcaattaaaaaacatgctactccccatatatttagacacacgtatatcagcatgctggccgaggcaaaagttgacttgccaactgtaatggaaagagttgggcatgacgacatgaaaacaacgatgaagatttatactcatgtaaccaaaaaaatgaaagaggatgcctcccacaaagtccagcagacttttggaaacatcctcaatttcgggatttcataaagaaatgttatttttttgttattttttcggttaattggggtgatgaaaaacggtcaaacccttggtgtatcaagggttttttccgtttgattacatcatgccgcccataccgcccatgccgcccatgtcaggcattcctgcgccgccggcgttttcttccggtttgtcagcgacaacggcttcagttgttaagagcattgctgctacagaagctgcgttttgcagggctgaacgtgtaacttttgtcgggtcaacgatacctttttcgatcatgtttacccattcgccggttgcagcgttgaagcctacgccgattttttcatttttcaggcgctcaacgatgacagatccttcaagtcctgcattgtgtgcgatttgacggatcggctcttcaagcgcgcgaagcacgatgttgatacctgtttgcgcatcgccttcagcttccactgcagcgactttgttgtatacattgacaagcgctgtaccaccgccggatacgataccttcttcaacagctgcgcgagttgagttgagggcgtcttcgatgcgaagtttacgctctttcagctcagtttcagtcgcagcgccgactttgatgacagctacgccgccggcaagtttcgcaagacgctcttgtaatttttctctgtcgaattcagaagttgtttcttccacttgagcgcggatttggttgacgcgagctgcgattttttcagtgtcgccggcgccttctacgattgttgtgttttctttcgttactacaactttagaagcgcgtcccaattgtccgatttcagtagatttcaggtcaaggcctaagtcttctgtgattacttctccgcctgtaagaacagagatgtcttcaagcattgctttacggcggtcaccgaagccaggagctttaacggcaacagcgttgaatgtgccgcgaagtttgttgacaacgagtgtagcaagagcttcaccttcaacatcttcagcgatcagaagcaatggtttgccttgctgtacaacttgctcaagcacaggaaggatttcttgaatgtttgtgatttttttgtctgtgattaagatgtaaggattgtcaagaaccgcttccatcttatcagagtcagtcaccatgtaaggagacgcatatccgcggtcgaattgcataccttccacaacttcaagctcagttgtgaagcctttagactcttcgattgtgatgacgccgtcgtttcctacgcgctccattgcttcagcgataaggcttccgacttcctcatcagcagcagagatcgcagcaacctgagcgatagactctttgccttcgatcggcttagaaatttcttttaagttttcgattgccacggttacggcttgttccatacctttacgtacgccgacagggttagctcccgcagttacgtttttcaggccttcgcggatcatagcctgcgcaagtacagtcgcagtcgtcgtaccgtcaccggcaacgtcgtttgttttgctggctacttcagctacaagcttcgcacccatgttttcaaacgcgtcttcaagttcaatttcttttgcgattgtcacaccgtcatttgtaattaacggagaaccgaattttttctccagaaccacgttacgtccttttggccctaaagttacttttacagcgtcagcaagcgcatcgacaccgcgaagcatagcgcggcgtgcttcttcactaaacttaatatcttttgccatgttaacgaaacctcctcgaatttttaaaaatatttatttgcttagccgattacagctaaaatgtcgctttcacgtaagattaagtattcagtaccttcgtatttcacttcagtaccggcgtattttgagaagataatgcggtcgccctcttttacttctaaagcaacgcgctctccgctttccaacacgcgacctgaaccggctgccacgattttgccttcttgcggcttttcttttgcagaatccggtaatacgattccgctggcagttttttcttcagattctacgagttcaatgacaacgcgatcacctaatggctttaacaatgtaataacctcctcaatagtatgaatatgtaattttagcactcagctctaaagagtgctaacacagttattataataaagaatctcacttccaatttcaagtcataagaataaaaaattttcacgcttacatgattctctctcgcactgattttctccttttttcacgtcaagttcacttgtgttacaataagaacaaataagttgattttataggataaaggagtacatatcatttgagaaaacagtattggtatatcattttgacatatgttatcatgcagctttccgcattgatcggcattcctttaatgtacaaattcggctatgcgggcgggcaccctacgaatgcgaatctcaccatggctcaggggatttattccgtcgtaagcttttttatctgcctgattatcgttctcttgattttgagaaccgcgccgaaacagacattaagaaacgggaagaaagcatccgccggcatgtccgttctctgggcggtcgcgggaatatggctcgctttattttctcagggaatcgccgggatgattgagcagtatgtctttcatgtgggcagcggttccgaaaacacgaaagccattcttaacattattaaagccatgccgctcatgattatcgtttcttctatcgtcgggccgattcttgaagaaatcattttccggaagatcatcttcggtgtattatatgaaaaaacgaatttctttatcgccggactgatcagttccgtcattttcggcattgtgcatcaagacctcacgcacctgctgctgtatacggccatgggctttacctttgcgttcttgtatgtgcagacgaaacggattattgtgccgatattcgcccatgtcatgatgaataccattgtcgtggtcatgcagctcggccccgcccaaaaatatattgaacagcatagtgagcaaatgcaattaattattggaggattgtttgtatgaggaacccaatgacttggggcttgatttatttcgcagtcggctgtatctttacgtatttggccgcaagctctccgggaagcatgtggtctttttattccatactgctgatggttttcgccgcttataatatcagcatctcgtttaaaatgttcgccttctcatttaaagtgaagaaaaaccaaaaataataaaagaaaagccatttctcatcattgagaaatggctttttttatgctgatacgtcctggtcagattcactgccggtctgccttttccgatacgccgcttttgaaatcaggatactgatctcgtataaaatgcaaagcggaatggtaatcatcaagtgagacagcagctcaggcggcgcaatcatcgcggcgatcacgagcagcacaaaatatgcgtacttcctgatcttcgataaaaacctcggcgtgataacaccgagtctcgttaaaaacatgatcagcaccggcatctgaaacagcagcccgaacggaatcgtcagctgcagcagaaaatgaaagtactcggtaatcccgattacctggttgacatccaggtcattcgagacccgcttcataaaatcaacgaccagcggaaataaaatataataagaaaacgacacaccgccgacaaacagcacgatcgaaatcggaatatagctgagtgttactttgcgctccttctcatacagacccgggctgacaaacgcccaaatctgatagagaataatcggcgaagtcaaaatgatgccgatgataaacgcgaactgcaaaaagataaacagcggatccgtcaggttaaaagcattaagggtgagctcttttacttcatcggctttttgaagatacacaatgataggttttgccagaaaaaagccggcaataaagaaaaccgtaaaggataacgccacaatcagcaatcgtttccgaagttcggcaatatgctccacaagcgtcatttgattcactctcatacgcgtcatcctatcttactgttcttctttctttttttcctcttcttcaccggctaatcccttagtagcgttcttaaattcacgaagcgtgtcccccgccgcttttcctaattcgggaagcttcttcggaccgaaaataatcaccgccaccacaccgataaccgccaggcttccaggaccgatcatgtgcagctcctcctttcgctattcaatttcttccaaaacagaataatgctttaagaaataaaccaatgattgaagctctactgctaaatctatatgatgaattcgaatgtgatccggcacattcaaacgggccggcgtaaagttaaggattcccttgattccgagtgacacgagccggtcggtgattgactgggcggcaaccgccggaacggtaagaatcgccacgggttcatcctttatgtgaagctctaaatcattaagatcaaagacaggcacaccgcctacctcagttcctattttactctgattcacatcaaaagccatagatatttttgtgttattattttttgtgaaattatagtgaagaaacgccgtccctaaatttccgacaccgatcaaaatgacgttcgtcgtttcatcctgatccagtgtttttctgaaaaatgacagcaggtaatccacattatagccgtatccttttttgccgagcgccccgaaataggaaaaatcccggcggatcgtggccgaatcgacttttaccgcatcgctcagttcagccgatgaaacgcgctgctttcctgacgcgtgtaaattctttaaaaagcgataataaagcggcagccgttttgccgtcgcctgtggaatttttgattgatccttgttcatgattggtcctccactttatactcagatgcatctcttttaaaatcaccgtttttgcctcctgttttttccatgaggcaggtcgggccgatgaccattcctttatccagcgccttgcacatgtcatacacggtcaaagcgcagactgaagcggaagttagcgcttccatttccacacctgtactccctttcgtttttacgcttgcctgtatatgaagaacggcttcggaatccttttcctcccagccgaatgaaatgtcgacgctgcttaaagaaagcgggtggcacatcgggataatcgctgacgtctgctttgcggccataattcctgccacctgtgcgacagccagcacgtctccttttccgatctcgcggtttttgattctgctgtacacgtcatgcttcatgtgtacgctggatatcgcagcggcagtacggactgttgaagatttatcgcttatatccaccatgcgggcacggccttcttcattaaaatgagaaaatccattcatatttaaactctccttacttctgatcatacactattttctccctgatgtcttatcctataatgttccaattctgatgtattgtttgctgacagcaggttgataagctacacttaacttattataacagaggtgaaataatatgatgatcttacaaattaatcagctatccaaatcttttggcgctgatcctattttaaacaatataaagcttgaagtcagatctcgggatcgcatcgccatagtaggcagaaacggagccggcaaatcaactctccttaaaattatcgcaggtcacctttcatatgaaaagggtgaattaatcaaaccgaaagaattaacgatgggatatcttgcccagcacacaggcttggaatcccagcttaccataaaagaagaactgctgagcgtttttgatttcctgaaagcaatggaaaaagagatgcgctctattgaagaaaagatggccacggccgccccgcggagcttgaaacgctgatgaaaacctatgacaggcttcagcaggatttcaaggataaaggcggctatcaatatgaagcggacgtccgatctatccttcacggactcggcttcggaaaatttgacgattccgtgaaagtgcaaagcctgagcggcggtcagaaaacaaggcttgcgctcggaaaactgctgctgacccagcctgatctgcttattctggatgaaccgacgaaccatctcgacatcgatacgcttacatggcttgagcattatttacagggatattcaggcgcaatcctgatcgtttcccacgacagatactttcttgataaagtcgtcagccaagtgtacgaggtctcacggacagaaagcaaaaaatacctcggcaactacagcgcctatttagaacaaaaagctgagcagtatgagaaagacctgaagctgtatgaaaaacagcaggacgaaatcgccaagcttcaagattttgtcgaccgcaatctggccagagcttctacaacgaaaagagcccaaagcagacgaaaacagcttgaacggatggacgtcatggcaaagccgctcggggatgagaaatccgccgccttccgttttgacattacaaaacagagcggaaacgacgtcctgcgcgtacaggatctttccatcagctatgacggccagccgccgctcttgaaaaacctgaccttcggcattacaagaggcgaaagcgccgccctcgtcggaccgaacggaatcggcaaatcaaccttgctgaaaacgattatgaatacaatcagtccggaatccgggtcgatcacgtacggttccaatgtcacaatcggctattacgatcaggagcaggctgaactgacatcgtccaaacgcgtgctggacgagctgtgggatgaatatccggacatgccggaaaaagaaatcagaacatgcctcggcaactttctgttcagcggagacgatgtcctgaaaccggtccgttcgttaagcggcggggagaaagcaagagtcgcgcttgccaagctgatgcttcaaaaagcaaactttctcatccttgatgagccgacaaaccaccttgacctggacagtaaagaggtgctggaaaacgccctgatcgactacccgggaacactgttatttgtatcgcatgaccgctactttattaacaggatcgccacaagagtgctggagctgtcacctgatcatgcagaagaatatttgggagactatgattattacaccgagaaaaaagcacagcagctggaactggaagaaatgaagcggcaggaaaaggagcagactcagcctgccggcaaggtcaaacaggatacgaaaagaacttacgaggaagaaaaagaatggaagaagaaagaacggcagcgcctgagacgcattgaagaaatcgaagcggccgtctcatccgccgaagagaaaatcagtgccaatgaggagctgctgtgcgatcctgacgtgtatcaggatcatgaaaaagtacagaccattcacgcggagaatgaagcccagaatcaaaagctcgaaaacttattagcagaatgggaggaactctcctcagaagaatagaaaaagtcaagcacctctttaaggggtgcttttttatccacagctatcctccttgtcagccatttaagtaagcgttttatacacactatccacaaaattttctgactttatccactttactaacaactttcagtcccttatccagactggatttctgaatatattcacaatcctgtggatatgttagaattatctgttaataagtaaaaaaaagcctcacgttttacaacgtgagacgatcaaaggatgttaattccaaaccgggctgtccgttcatatcgtacgagccccggatccccttttcaaaagcaacggttccggcagccgcaatcatcgctgcattgtccgtgcataaagaaagcggcgggatgacaagctcgggatctcccgaatggctgaattcctgctgcagtgcggctctcaaccctttgttagcggctacgccccctgcaagcagcacttgtttaaccctgtattctttcgcggccttagaggtttttgccgtcagtacatcaatgacactctgctgaaagcttgcggcaagatcctccggaggaatcacctcatttttttgcgaggcgttatgaagcgtgttaatcacggctgatttcaggccgctgaagctgaaattgtaagacccttcttccagccacgcacgcggaagcggaatggaatccgttcccgcagcagccagcttatcaatctgcggccctcccggataaggaagccccatcgttcttgccactttgtcgtaagcttcgcctgcggcatcatccagcgtttcaccgataacctcgaatgaaccgtgttctttcatataaaccaattccgtatgtccgcctgacacaaccaaagcaagcgccgggaactgaagctctcctatcagcctgtttgcataaatatggcccgcaatgtgatggacgccgactaacggtatttgatgggcaaagcttaacgcctttgccgcattgaccccgattaacagggctccgacaagtccgggtccttccgttacggcaatcgcatcaagatcatcaaagcccatctccgcctttgaaagagcttcctcaatcacaagggtaatctgctccacatgatgtctggacgctatttcaggcacgaccccgccgaaacgtttatggctttcaatttgagaagcgacaacgtttgaaatgatgtcttttccgttttttacgactgaggccgcagtttcatcacagcttgtttcgattcctaatacataaatatcttgtttttcactcatgtaatgtcacccacattaataacgcatcttccccgttatctgtatagtattgttttctgattcctccggcctgaagaccgaatttcttatataaggattgggcgggatgatttgagaccctgacttcgagagagagccttcttgcctttttttctctgcacaattctatcgcagagcgaaacagcgcttctcccaacgattggccccgatattccggcttaatggctatgttcgtaatctgcgcgtcatctataataatccagattccgcaataccccgccagacagccgtccttttcaatgacaaggtagtgggcatacggattttccaaaagctcatgataaaatgaatccttcgtccacggagaagtaaaggatgctgtttcaatttcataaatttgatcaatatcttccggccgcatgcttcgaatcgccgttttcgttttcatccctatcaccctatttttgagattccatccatttcgcttcagcctctgccagacgcaaataatccggaacaaggctgtggacatccgcttcttctttttccaagcctaaaaacgccagctctgacggccgcggattatgctgtgcagccgttcctatcactgcttgatttgtcagcccatgcagaatggtttcttcatgaatggctgtatcatgccctaaaaataaaaccggagacgctttttctttcagcatgtcgagccaatcagtcaaaagcacattctgatcaggaagaacggattgtaagcggccgtcctgatattcataaagtcccgtatatacctgtccgcgccgggcatcaaataacgggcagatcagtccttgaaagtgccgtccgttagccgccagcacctccaggctcgagacagcggaaaccggaagcttcagcgaccatgccaatgtttttgccagcgtcacaccgattctgacacctgtgtacgatccaggtcctttcgccaccgctattttcgtaaggtcctgcggtgttaggccgcaatccttcagcaatgaattgacagcaggcatcgcccgcacggaatgattcttttttaaatatgtaatatactccgccatcaccgttttctctcgaacgagcgcggcacccagcgtgtaatttgacgtatcaattgccagtattgtcatgtttatttatctcctcacaaagcgtttcataccgtgttccgcaagccgtaaaggtaatgtcccttgcctcatcaccggctctcttgatgacgatctgcagccgttcagcaggcagctgatcctgaattaaatgagcccattcaattaaacagacgccttgtccctcaaaatattcttcaagccctaagtcttcgctttcatcctccatacgatacacgtccatatgatatagaggaatcgaaccgtcatggtattcttttataattgtaaaagtcgggctgtttaccactctcgtgattcccagtccttcggcaaaaccctttgtaaaagtcgtttttcccgcgcctaagtcgccttccagtgtcaaaatgtctcccggctttgccaaagaagcggcaagcttggctacggctttcgtttcttcggggtttttcgttctccattgtaatgtcttcaaagtgagtcacccgtcttatttaaaatgattgtatccttttttctcaaggacgatttgtctctgatcattggctgtcaaaagaacacatgcttccttccgttcagataccgcccctatcttcgcaatcggaatgcccgattgagtgcagtaatcaagcagagaggtccactcttgctgagaaaccgttccaaccaattcaaaatcttcaccgccgaataacacccatttcttccactcagaatctgcctcaggcaaatccggatgcaccggcagaagttgttcttcaatttctatcgtaactgaacttgccgcagctatttcatgcagctcactggccaatccgtcactgatatcattcagagccgcgcgctgaagctgagagcagaagcggccgacttgaactctcggaacgggccgtttatgtttttggataaaataatcactcgtatgaaaagcagaaggatgtgtttctcccaacaaaagagacagtcctgctgcggacgagccgatatcccccgtaacaaacacaacatccccgggtcttgccgagcttcgcagacaagcgcaatccttctcaacttctccgatgacagtaacggtaattacggcttgaccggaagcggagacggtatctcccccgatcaaatccatttgatatagtttcgccagttccgccattccttcatacattgcctggacgtcagctttctgccagcaagaaggaaccgctagagacaccaaataaaacttcggaatgcctcccatcgccgccacgtcactaatgttaacagcaagcgccttataaccgatatcatgaggagaggaatactctaatttaaaatggacattctccaccattgtatcaaggcagacaatttgctgcatgtggggtgacgctgtataaaccgcaccatcatcaccgatccctacatcgacggaaggatgataatgcgaatgcggtgtaatactgtgaatcaaatcaaactcatccatatatctcccgtcttcctttctgacgctcttgtgaaatacagctctttctagtgtatcggattatgtttcaatatccaagactttaacgatataaaagaaagcttggttagataccaagctgccagcattaaaagaaaacacaaaaaaaacgaaaacatgatcgtttcgtttacaataaaaatggcggtccggacgggactcgaacccgcgacctcctgcgtgacaggcaggcattctaaccaactgaactaccggaccatttaatttttggttgcgggggcaggatttgaacctgcgaccttcgggttatgagcccgacgagctaccgaactgctccaccccgcgatgataaaattttagaaaagcttggcggcgtcctactctcacagggggaaacccccgactaccatcggcgctgaagagcttaacttccgtgttcggcatgggaacgggtgtgacctcttcgctatcgccaccaaaccattgagagtgttctctcaaaactagataacagtaagcatacattcaaattggttaagtcctcgatcgattagtatctgtcagctccatgtgtcgccacacttccacctcagacctatcaacctgatcatctttcagggatcttacttccttgcggaatgggaaatctcatcttgaggggggcttcatgcttagatgctttcagcacttatcccgtccgcacatagctacccagcgatgcccttggcagaacaactggtacaccagcggtgcgtccatcccggtcctctcgtactaaggacagctcctctcaaatttcctgcgcccgcgacggatagggaccgaactgtctcacgacgttctgaacccagctcgcgtaccgctttaatgggcgaacagcccaacccttgggaccgactacagccccaggatgcgatgagccgacatcgaggtgccaaacctccccgtcgatgtggactcttggggagataagcctgttatccccggggtagcttttatccgttgagcgatggcccttccatgcggaaccaccggatcactaagcccgactttcgtccctgctcgacttgtaggtctcgcagtcaagctcccttgtgcctttacactctgcgaatgatttccaaccattctgagggaacctttgggcgcctccgttaccttttaggaggcgaccgccccagtcaaactgcccacctgacactgtctccccgcccgataagggcggcgggttagaaggtcaatacagccagggtagtatcccaccgatgcctccaccgaagctggcgctccggtttccaaggctcctacctatcctgtacaagctgtaccaacattcaatatcaggctgcagtaaagctccacggggtctttccgtcctgtcgcgggtaacctgcatcttcacaggtactataatttcaccgagtctctcgttgagacagtgcccagatcgttgcgcctttcgtgcgggtcggaacttacccgacaaggaatttcgctaccttaggaccgttatagttacggccgccgtttactggggcttcaattcgcaccttcgcttacgctaagcgctcctcttaaccttccagcaccgggcaggcgtcagcccctatacttcgccttacggcttcgcagagacctgtgtttttgctaaacagtcgcctgggcctattcactgcggctctctcgggcttgcaccctaacagagcaccccttctcccgaagttacggggtcattttgccgagttccttaacgagagttctctcgatcaccttaggattctctcctcgcctacctgtgtcggtttgcggtacgggcacctctcacctcgctagaggcttttcttggcagtgtggaatcaggaacttcgctactataattcgctcgccatcacagctcagccttcacgggaaacggatttgcctatttcccagcctaactgcttggacgcggatatccaataccgcgcttaccctatcctcctgcgtccccccattgctcaaatggtgaggaggtggtacaggaatatcaacctgttatccatcgcctacgcctttcggcctcggcttaggtcccgactaaccctgagcggacgagccttcctcaggaaaccttaggcattcggtggaggggattctcacccctctttcgctactcataccggcattctcacttctaagcgctccacaagtccttccggtcttgcttcacagcccttagaacgctctcctaccactgttcgaagaacagtccgcagcttcggtgatacgtttagccccggtacattttcggcgcagagtcactcgaccagtgagctattacgcactctttaaatggtggctgcttctaagccaacatcctggttgtctaagcaactccacatccttttccacttaacgtatactttgggaccttagctggcggtctgggctgtttccctttcgactacggatcttatcactcgcagtctgactcccaaggataagtcatcggcattcggagtttgactgaattcggtaacccggtaggggcccctagtccaatcagtgctctacctccgagactcttaccttgaggctagccctaaagctatttcggagagaaccagctatctccaggttcgattggcatttcacccctacccacacctcatccccgcacttttcaacgtgcgtgggttcgggcctccattcagtgttacctgaacttcaccctggacatgggtagatcacctggtttcgggtctacgaccacgtactcaattcgccctattcagactcgctttcgctgcggctccgcatcttctgcttaaccttgcacgggatcgtaactcgccggttcattctacaaaaggcacgccatcacccgttaacgggctctgactacttgtaggcacacggtttcaggatctctttcactccccttccggggtgcttttcacctttccctcacggtactggttcactatcggtcactagggagtatttagccttgggagatggtcctcccggattccgacggaatttcacgtgttccgccgtactcaggatccactcaggagagaacgaagttttgactacagggctgttacctcctatggcgggcctttccagacctcttcatctacctcgttcctttgtaactccgtacagagtgtcctacaaccccaagaggcaagcctcttggtttgggctggtcccgtttcgctcgccgctactcagggaatcgcatttgctttctcttcctccgggtacttagatgtttcagttccccgggtctgccttctcatatcctatgtattcagatatggataccactccattacgagtggtgggtttccccattcggaaatctccggatcaaagcttgcttacagctccccgaagcatatcggtgttcgtcccgtccttcatcggctcctagtgccaaggcatccaccgtgcgccctttctaacttaaccgttaaaaagaatcactacgtgatatcttgcattactaattgaatgtgaattacttctgttatctagttttcaaagaacaatatctcgaagaatcgaatgatccttcaaaactaaacaagacagggaacgttctgtttataagacccaaggtcttatattccgttaaaatccttagaaaggaggtgatccagccgcaccttccgatacggctaccttgttacgacttcaccccaatcatctgtcccaccttcggcggctggctccataaaggttacctcaccgacttcgggtgttacaaactctcgtggtgtgacgggcggtgtgtacaaggcccgggaacgtattcaccgcggcatgctgatccgcgattactagcgattccagcttcacgcagtcgagttgcagactgcgatccgaactgagaacagatttgtgggattggcttaacctcgcggtttcgctgccctttgttctgtccattgtagcacgtgtgtagcccaggtcataaggggcatgatgatttgacgtcatccccaccttcctccggtttgtcaccggcagtcaccttagagtgcccaactgaatgctggcaactaagatcaagggttgcgctcgttgcgggacttaacccaacatctcacgacacgagctgacgacaaccatgcaccacctgtcactctgcccccgaaggggacgtcctatctctaggattgtcagaggatgtcaagacctggtaaggttcttcgcgttgcttcgaattaaaccacatgctccaccgcttgtgcgggcccccgtcaattcctttgagtttcagtcttgcgaccgtactccccaggcggagtgcttaatgcgttagctgcagcactaaggggcggaaaccccctaacacttagcactcatcgtttacggcgtggactaccagggtatctaatcctgttcgctccccacgctttcgctcctcagcgtcagttacagaccagagagtcgccttcgccactggtgttcctccacatctctacgcatttcaccgctacacgtggaattccactctcctcttctgcactcaagttccccagtttccaatgaccctccccggttgagccgggggctttcacatcagacttaagaaaccgcctgcgagccctttacgcccaataattccggacaacgcttgccacctacgtattaccgcggctgctggcacgtagttagccgtggctttctggttaggtaccgtcaaggtgccgccctatttgaacggcacttgttcttccctaacaacagagctttacgatccgaaaaccttcatcactcacgcggcgttgctccgtcagactttcgtccattgcggaagattccctactgctgcctcccgtaggagtctgggccgtgtctcagtcccagtgtggccgatcaccctctcaggtcggctacgcatcgtcgccttggtgagccgttacctcaccaactagctaatgcgccgcgggtccatctgtaagtggtagccgaagccaccttttatgtctgaaccatgcggttcagacaaccatccggtattagccccggtttcccggagttatcccagtcttacaggcaggttacccacgtgttactcacccgtccgccgctaacatcagggagcaagctcccatctgtccgctcgacttgcatgtattaggcacgccgccagcgttcgtcctgagccaggatcaaactctccgataaagtagtttgactgactacgcacatcgctgtgcgatttatttaaaactttgaattaacaggtacgttttgtcttgtttagttttcaaagatcattataatggagcgggtgatgagaatcgaactcacgacatcagcttggaaggctgaggttttaccactaaactacacccgcatttgaattggcgcgcccgagaggagtcgaacccctaaccttttgatccgtagtcaaacgctctatccaattgagctacgggcgcttatcaggcgacttaactatcatactaccaatcagttatgatgtcaagtgttattttatttcttttcgaagtcttttttctcgacctcatttattatacacgctttcgagaatttgtaaagtcttttttaaaaagatcattttctcatttgtcgttatcgctttgttcatcagcgacgtttaataatataccacgcactttaaattaggtcaacacttttacgaaactttttttccgcttattattcccttctatataataaataaaaagcaggattcccaggaaccccgcgtctattcagattacccgctcacctcggcttctgcgctattacgatctgttttttcataggtacggaagttttgttcaagctgttcgagcgaaagacctttcgtttccggaaggaaccttttcacaaatataacggacgctatccctaacaggacaaaaatgaagaaggttgcagacaatccgatgtttgcgagcatgaccggaaaagttaaaccaacaatgaagttcacgatccagaggcagaagacagtcacccccataccaagcccccgcaatcgcagcgggaatatctccgacagcatcagccaggtcaccggagagacagccccctgctgaaacgcaaggaaagtgactgttaatgaaagaaccacataaggaagagcaggcgatcctttcagcacgacagacagaactccgatcaaaagcagcaccgcagtcgttccgatcagccccgtcatcagcatcgggcggcggccgactttgccgagaagccatattcccacaaaagtcgcgagcaccgaaatcacaccgttagcgatattgccgattaatgcggcttttgtctcaaaaccggcatcttttaaaatttgagttccataatacataattgaattcacgccggtgagctgctgcactaccgcaattccgatcccgataaacacaatgcggcgcacccacggaacggcaagatccttaaaggtcgcctgctccatctgagcttccttatgaaaggcagattcaatctcagcgagctcagacttcgctttctcttcattccttattcgccggagaacgtgcaaagcatcttcttttcttcctttagaaaccagccagcgcggactttcaggaactttcagcataccgaaaaacaagaataccgccggaagggccgcgataacgagcatataacgccaagcgtgagaggtatcaccaagcacattgccgatgatagcattacacgtgaaggcaagcagctggcccgttacaatcatcaattcattttgggtaaccattctccctcggctttccgccggcgacatttcagccaaatatgccggaacggttacggatgctcccccgacggcaagccccagcagaaaacgggagatgatcataaccgatacgttaggcgccagtgtacatccaagcgtcgctataaagaacaaaacggcaaggataaggatatttttacgtctgccgttatagtccgacaatctccctccgaaaaccgcgccgatcgcagcgcccaagagcagggagctcgccaccatcccttcagtcaaagcggtaagattaagctggtcagcttccgccataaacggcagcgccccattaatcacaccggtatcgtagccgaaaagaagccccccgaatgtcgatactaaaatgatggttctcaaaaatgaatgctggctgctatttttattcatcttcaaatcctcctagtttttacacagagataatatcggaatattcagttatcaatatttacacctctaacgtctgcatacaaggtctgaccgtccaaaacagttatataagaagaaaatgttccgaaagcgttatcatttatagtgattattcgctctccccctctcgtcatattgttattttatagttactttgtagtgaagttataatgatattattggtacttatgttaatatcataattttaaaagcgctttcagtcaataaatatttcagaaaattttataactcacctttatatcacctatatataatcaattttcgttttatatcaatttatttccataatatactcaattaattacccctattataatcaataattgattacatattgaaaacccccaactgctgattgggggtttttgttttattcttcgtttattgtaacaatcgttctccctctcgcttctccttttaaaagggcaggaagcgtatccggcagctcttcaagtgtaatttccttttgaataaaggcctccagatctgcaggcttgaagtcatcagctaaacgctgccatgttttctttcttgtctccatcggacagaatacggaatcaattcccaagagactgacgccgcgcaatataaacggaaagactgtagccgggagtttcgttcccgctgtcagtccgctcacagcaactgatccgccgtactgaatctgactgagaactgaagcaagcggctcacctccgaccggatcgacggccgctgcccatttttgtttttgcattggttttaacgtgccgttatacacttcgtcgcggtgaatgaccgtctttgctccgaggctcttcaaatacccgctttcttcttcttttcccgtactggcctcgacctcataacctaaggttgaaagaatggagacggcaaagcttccgacgccccctgtcgctcccgtcaccagcacctttcctttttcaggagcggcatggttttcttcaagacgctggacggacaatgcggcagtgaagccggcggttccgatcgtcatggcttctttaagtgtcagaccttcaggcagcggcacgatccaatctgccggaatgcgggccagcccgctatagccgccaaaatgggaaacgcctatgccgtagcttgtcgcaatgactttgtccccttctttaaaacgggcgtcatctgaagaaacgacgattcccgctaaatcaattcccggcacgaaaggatacgaggttacgatcttgccgtcaggaatggcagccaagctgtctttataattcacccctgagtagcaaaccttaatcagcacttcaccctcgggaaggtcctgaaccgccagctcccgtacgctgactgaaaaccggtcttcacgctgatcgactactaacgctttaaattgatctgtcatcactacgtctccttaaaatgaattgaatggctttggaaaagcataaaataagtttgatttgttttcaaatgtcctgccctgtgtagtatgatcaaaagtaaaaacagcgaaagagtggttacgcatcatgtctgataaacaaaacaaagataacaaaaacaacaacagcaatcagccattaccggacattattcataccgccgttttcaaggcgccgatacaagttgtctgggatacggtctctacggcggacggcctgtctctctggtttatgccgaatgatttcacgcctcaagaagacagtgagtttcagctggaatctccgttcggtccgtctccgtgcaagctgctggatattgaagcgccgtaccgcctttctttttcgtgggatacggaaggctggatcgtctcttttgtcttaaaggaaacggaaagcggagatacggaattcactctcattcacggcggatggaaagagccggaagccgtcatcaataaagtcaatcggaaaagctccgagattcacagtacgatggatcaaggatggaacgggcttgtcaacacgaaacttcgcggggcggttgaggcttaacacaaaaggacggacacgctttccgtcctttttttgatgccgatacataaaaactgactttgcaaagacactaacagaagaaccgaaaacttctttcagggggcgctgtttatgtattattacaaagaagagctgatcaatatcattaaaccggacaagccggacccggccgcggccaaggtgcttcaggaaattttaggcgggcattacggggaaatgcggacgatgatgcaatactttttccaaagctctaatttcagaggaaaagaaaagcagttccgcgacctgcttcgcggcgtatttttagaagaaattgcacacgttgagctcgtccagcatacgattaatgcgctgctggatgaaagcggcgctgagggcgccggaaatcaggcagcagatcaggcgccgctagacgaagcggttaaacacgccaatccgcaccattatattatcggggcgcaaagttctcttcctgccgatgcaagcggcaatccatggaacgggtcttgggtatacaaccacgggaatctgatttccgatctattggacaatgtcgtgctggaatcaaccggcgtgctgcaaaagacgcgcatttatgaaatgagctcaaaccagacgttcagagaaacactcggttttctgatcgtccgtgacaacgcccatcaaaatgcatttacaaaagcgctggaaacactgggtgtcgaatggggcaaattatttcccgtgccgaattatgatattgaaaaatacccggaatgccggaaattcgttgaaatgggttatcataatacccaatttaatttcagactggatccgacacggatcggagaaattctgcagggaacgacgccgagccgaaacggcggcgaattaagtgtgtcagagcctcctaaaggtttccccgtgccggaacttcccgagcttccgaatgagcacagccccggactgaaagatatgaacttgtaacaaaaaacgcctgtttcgggcgttttttgtttttctgaatatgaggtttgaatgtgttcaaaacggggaatataagccgggagatcttgccatacggccgtgattttgatgtgagcacatttctgtacatacttcgtttcgaaagttgtcctaattttccagccggccggctgggtatgtttgaatgataatgggaattatgtaaagagaacaatgtcttttttaaggaggcagcgaatgtctaagcaaggaaacttccagaaaactatgtcactttttgatcttattttaatcggcatgggagccatattcggttcggcatggctgtttgccgtcagtaacgtcgcctctaaagcgggcccgtcaggcgttttttcctggctgatcggcgggggaatcatcttattgatcggcttggtttatgcggaactgggcgccgcgctgccgcggaccgggggaattatccggtatcccgtatattcacacggacacctggtcggatatttaatttcctttgtcaccattgtggcatacacgagtcttatttctatagaagtaacggcggtccgccaatacgtggcgtattggtttcccggtttgaccgtaaaaggctctgattctccgacaattgccggatggatattgcaatttgcgctgctctgcctgttcttcctcctcaattactggagtgtcaaaacctttgcgaaagcaaacttcattatttcgatttttaaatatgtcgtaccgattacggtaattgttgtactgatttttcattttcacccgggcaatatgaccgttcacggattcgcgccttttggtttcaccggaattcaggccgcgatttccacaggcggcgtcatgtttgcataccttgggctgcatccgattgtggctgtcgcgagtgaagtgcagaatccgaagcggaacattccgattgcattgattgtttgtattatcgtttctactattatttataccgtgctgcagctcacttttatcggggcgatcccgggggataccctgaagcacggatggccggctatcgggactgaattctcccttccgttcaaagatatcgccgtcttgctcggtttggggtggctggcgacattggtcattttagatgcgattttatcaccgggcggtaacggaaatatctttatgaatacgacttcacgtctcgtctatgcctgggccagaaacggaacattattcagcattttttctaaagtcaataaagaaaccgggacaccgcgtgcctccctttggctttcgttcggtctggctgttttttggacgcttccgttcccttcttggaacgctcttgttaacgtatgctccgtcgcattgattctgtcttatgcgattgcgccgatttcttctgcggcgctgagagtcaacgcaaagaacattaacagaccgttttatttaaaagggatgagcatcatcgggccgctgtcgtttatttttacctcttatattgtatattggtccggatggcgcaccgtatcctggcttctcggttctcaaattgtcatgtttctgatctatctctgtttcagtaaatatgctcccaaagatgatgtcagcatacgccagcagctgaaatcagcatggtggatcgtcggcttttatgtcatgatgctgattttctcctatctcggctcgttcggccacggattgggcattatcagcaatccgcttgacctgattctgatcgccatcggttcgctcggtatttattactgggcaaaatatacaggtctgccgaaggctatgatcgacagtgataaatgacgaatgccggaaagaagtatggtcttctttccggtatttttatgttaagggatgacaaaaaagcgaacatgcgataaaatgaatgacagtcattcataaaaggaggaacccctctattggcaaaacaaagctcgggaaaatacgaaaagatcctgcaagccgcgattgaagtcatttctgaaaaaggattagacaaagcatccatttcagaaatcgtcaaaaaagccggaacggcccaaggtacgttttacttatatttttcttctaaaaacgcactgatatccgcgattgcagaaaacctgctcgacactacgctggacagaataaaagggaaaacggacggttctgaagatttttggacgttgctggacattttggtagatgagacatttcacatcacccggcttcataaagatattatcgttctctgttattccggtcttgccatcgatcattcaatggagaaatgggaagccatttatcagccttattattcctggctggaaggcatgatcaatacggccattgaacagggtgaggtcatcagcggcattcatgtcagatggacggccagaacgattatcaacgttgtcgagaacgcggctgaacggttttatatcggctgtgaacaggatgtcgatctcgaagtatataaaaaagaaatattcagctttctcaaaagaagcttgcagaaatgattggcggagaccgatcatttttgaccgccgtaaaaatgactgacattcattcataactgaggtgactgtatcatgtattggctgcttgtattgatagccggattgttagaagtagtttgggcgtccgccctgaagcatgcggattcgctctttgattggattggtattttccttttgattgccgtcagctttctgatgctgatccgctcttataaaaaaattccgatggctgccgcatataccgtttttgtcggaataggcaccgtcggcacatatgtaacgggcgtcattttaggcgaatcgttttcaatcggacaaatattctttttggctttgctgttgtccggcattttaggaatgaaggtatttacgaaagaaactgaaacaaggggtgaacattaatggcatggctgctgttatttattgccggagcggaggaagttgtagcggccgttgccatgaaacatattgacggttttaaaaaaaagtggccgctgattgtcatggtaacaggctttatgctttcattcttttgcctttccggagcgatgcaggttcttcccacaggtgtcgcgtatgcggcttggaccggcatgggaagcatcggcgtttcggccgtaggcatactttggtttaaagaaaaattcaatctgtcacaattggtgtctctggggcttatcctcatcggtgtcatcggcttaaaactgacagcgtaacggcctgagacagctttttaaataaaaaacaaaggaccctaaacgggtcctttgtttttttatgctgttttgatctgttccgcttttcccgctccgactccgaaaatgaaaatcagaacagagactgcgatcagcatgaataacggaaccgtccagccgtgcgtgatgtcatgcagcaaaccgaatacaagcggcccgaacgcggcaagcaggtatccgaatgactgggccatgccggaaagcgccgcggcttcatgaacatgccgggtccgcaggctgaagaacatcatcgccagactgaacgcacagcctcccgcaattccgatcaaaatgacccatagcggagtgagagccgggcttccgaaaagaacgccggcaatgccgataaggaaaaataaagccgtcagtccggcgagtgcgcgctgatttttcattttagcggcagcgatcggcacgataaaagtaatcggcaggactgagaattgcattaatgaaagcatccatcccgccttacttgagctgagtccattctgctgaagaatttccggcagccaagcgatgacggtgtaaaaaataagggattgcagccccatgaacatcgttaccttccaagccagcggagaccgcatcagactgttttttttctctccgtttgtcccagtcgtgcggacgggcagttcgcgtcctcgcatttgcggaatccacatgacgaacgcaataaaagaaaggatagcccagcagccgagcgcgcctttccagcctacccccgctgaagaggcgatcggcacgctgatgccggatgcaatcgcgccgcacagattcatagaaaccgagtagacgccggtcatgatgcctaaatttccgggaaacttatgtttaatgagactcggcagcaggacgttgcatacggcgatcgacaatcccaacaggatcgttccgaaaaagagagtgccgattccggcgatggagcgcagcagagttccggctgtcaggacaattaatgatgacagtaagacaatctcggtcccgaagcgccgggacaataaaggaacaaacggcgacagacatgcaaaggccaaaagcggcactgtcgtaatggtgccggcagccgcattggtcatgccgaggctgtcccgaattgaggaaacgagcggtccgaccgatgtcagaggcgctctgaggttggcccctatcaatatgactccgatgaccagcaatatcagttttttacgctgacttgcttgcagaacttgatgttcgtctttaattttcatgttcatcctccatgtgtattgtatctttaaatactgtgatgtattggttgacggcctccatggcctgatccggtttctgtccgataatcgcggcggcaagctgggtgtggatccggatagcaggggtgatttccaacaggttatggactgacgcacaaagcgcctccgtcatatgctcgtatagatcagaaagcatattgttatgggccgcctgtacaattgttttgtgcagcttaatgtcggcttcggcataccgttttcgatcttcattttgcaaggccgcttcacattcatccaagcatgccttcagtgctttcaggtcttcgtcattacgcctttccgccgccaatcgtgcagcttctctttcgagtgcgtatctgacttctaatgtttcaagcaaatttgattttttaatatggcggtaaaatgccgcgccgagaacactggatgagctgacatacgtaccgctcccctgccttgtctgcagcaggccggcatgtacgagcgcccgaatggcctcacgcaacgtgtttcggctcacatcaaattgcttcattaaatccagctcagggggaatgcgcgtcccgaccggccatttatccgattgaattaacgattcaatttgcgccaccacttgttctacgagcgacagtctgcttgttttggatatctccatcaaaacacctctgaaatttgtaggatgattctatcattgggtaatataacataaaagaagcgacgatgtaaatcagcggcaacaaaaaaagagtgagtttttctctcactcttcggcgcttttatgaacgttttatattgactgaggtcacgacaaacttgtcatgacggtggcgggaaaatgaatattcaaagggagtgccgttgtccaaaaagcctacatgctcgacttcaagtatcgggtcatccggccggcagccgagatattgctgatccatatcatccgacttgcacgctctgatttttctgtgtgtgcccgcgattttgagctgcaatccccgcgtaatatgatcgtagatggaatggttgagcacctcgtcattaatgccgggtataaggctcgccggcatgtacgttttttcaagaacgtacggttcgccttcaacgattctgagcctcactacataatagacgggagtcttttcatcgatagccaaatgtgcggcgacatcttgagacggaaactgcacttcaaaccggatgaccttgctcttgatatttttgccttttaacaaattgctcaagccgagaatttcgttgctgactacgtgaacgtgctcatcctgcatggctgattgaatgataaatgtgccgtgccctctttttctgaaaagcatcccttcagccgcaagtgtatcaagcgcccgcttcatcgtcatccggctgcacccgaactccgcagcgagcgtcttttcatccgggatcggctgatctatgtcatatacactgcttttaatcctctttctcatttcgttggcgattttttcgtacttattcatcggtttcctccggctgtgtaatgtttgatctgtatagactccttacggttatcataaatttttttccctgcttcatcaatgacgttacagccgccgatattgaaattgaaaggatttcctcgaattttctatggaatctccctcactattatggtagaattttttgcagaaacggacacaaccgaatattgcaatatattgtataacctcaatgatatggtttgagggtgtctaccaggaaccgtaaaatcctgattacaaaaattgtcccgtacactttttgtaatcaggattttttattttctaaaaaataaaaaaaggagtatctgtacatgaatttcaaagtatttctgcttgcagcatctaccatcgcagtcggattggttgaattaattgtgggcggtattcttccgcaaatcgcttccgacttagatatatccattgtcagcgcggggcagctgatcagcgtgtttgcgctcggttacgcggtatccggcccgctgcttttggcagtgacggcaaaggctgaacgaaagcggctttatttaatcgcactgtttattttcttcctaagtaatctggtcgcttatttcagtcccaatttcgccgttcttatggtgtcacgggtgctcgcttccatgagcacagggctgattgtcgtcctttctttaacgattgctcctaaaatcgtggcgcctgaatacagagcgcgggcgatcggcatcattttcatggggttcagctccgcaatcgctttaggcgtgcctgtcggcattatcatcagcaatgccttcggatggcgtgttctgttcttgggaatcggcgtattatctctcatttccatgctgattatcagcgtctttttcgaaaaaatacctgctgaaaaaatgattccgtttcgtgagcagatcaagacgatcgggaccgccaaaattgccagcgcacaccttgtcaccttgtttacattggcggggcattacacactctatgcctactttgcgccttttttggaaagaacgcttcatttgagttccgtttgggtcagtgtatgctactttttgttcggtctgtcagcggtatgcggcggcccgttcggaggctggctgtatgaccgtttaggagcatttaaaagcatcatgcttgtgaccgtttctttcgctctgatcctgtttattcttccgctgacaacggtttctttaatcattttcctgcctgcgatggtgatctggggattgctcagctggagccttgcgccggcgcagcaaagctatttaatcaaaattgcgcctgagtcttccgatattcagcaaagcttcaacacgtccgctttgcagatcggcatcgcgctcgggtcagccatcggcggcggcgtgatcggacaaaccggttctgtcacagcaacagcctggtgcggcggtttgattgtcattatcgctgtcgcgttagctgtattctctttaacgagacctgccttgaaaagaaaatccgcataaatgtgagaccgcaaaaaagccaaaggagttccttcggctttggcggtctttttattttgcggcagcaagctcgtcttctgtcacccatttatgattggttactttttggccgccgtcagtcggtgtatagtcgaccatataaacggttgtctttttggctgaatcaataacggcttcggcacccttcatgcctttcatatgggatgcctcgatcacggccttgtcacccggttttaacgttttatcaccggcgcccttcagctcttcctgaatgacccatttgtgatcttcgacgcgctttcctcccgtttccggagtgtaagatacactgtaaaccgttgtatcataagcaccttttacggttccttgcgcatttttcatgcctttcatatgagaagctaaaatcatgacgtcactgccgactttataagtcggattttcggctttctttaaacctttcggcacctcggatgaacctgagtgattcatgtcttcgtgagagtgcgtttctttgtctttcgctttttcgcttcctcctgaagattgaccgttgcatccggcaagcgccagaacggggatcaggagaaacatgctgaataaaaatagtctcgctttcatttcaagaactcctttgcctttttgatttttcattttccctttcgtttcttcggtaaaacaaaaagatggcctgtcatttctcctaattcttcaactctctctttattgccttttatcaggtgaaattgttcacaaaatgtacacattaatagagatgcagtataatttaattatcagataatagggggaactcatcatgaaaacgaaggtttttgcggtggtattgggcgctgttttaatgattgcggggttggttttggcagaagtttcgctttatatggaatacatcacaatggtcggagctatgattttttcttctatatttatgtcagagccgaaaagaaaatttcgcgtcattaaaggggtttgacttttctattaccgccgtcttctcaggacggcggttttgttttgcatgtcagtcagtctatccgcaaagccgtttcttctgtgccgtcctgatataaaacgaaatgcggggcagtttgtgctttatcacctgcaaattcaatttcaagcggcagcgccctgacaaaataacgggtttccgtcattgggaataattcaaatggtgtctgcccgtctattgcaagatacaatcggttttcttttaccgtcaccgatgcatgtgtgtcatcctgaaatgagtaattgccggtaaatctgctgtaaatcgcaggatcgatatctgcttttttctgatccgccggacgtttcggaatcacgtacggctgatcaaataagatgtttacggccgcggcaatcacagcttgttcaaattgatacgattgttccatattgctgagataaatcagtgttttgttctggtcaatataccggatcatcagagttgaataacccggccagcctccgtcgtgactgataaccttccctttttgggcgctgttttgaatcatccagccaaatccgtatccgaattgctcttcttcattccaatagcccggtgtaaacgcttgatctttagactctttgccgatgatttcttccttataaagagcctgatcaaacagatataaatctctaatagtggagttaacggttccgtcaccttgaatcccgtcaagaaagacgacataatcggtttcctcaagttcatccggcagcacatattctccggaatgaacatcatacacatagccatatgcatagtttggaatgttttctttactcagccttctgttataaatccgcgtatcgtgcatacgaagcggatgaaatacggcttgtttcataaattcagcaaaactcatgcctgatacaatttctataataaccgctaacaccgcataccccgtattactgtatagccactccttgcccggcgggaaataagcatccggtttatgctgcttaagcatatcgatcacatcttgattaacggcaattctgtcccggtcccaatgtgttaaaaataactccatatagtccggcaatcctgacgtatgatggagtaaatgccgaatggtaatgcccggataaggaaaatcaggaagccaccgctctatcatatcgtcataacgcagcttccctcgctgctctaaaatgataacgcctaaagctgtaaacggcttcgatactgaggccaattcaaagactgattggtcattcagcatcctctttgttttcagttctgcagcgccgaatgaaccctgatataagatgcggccgttttccgctgccaatacagctccgtttatttcatgtctttcgtctaaagtgctgaaaagctgttcaaaagcttgttttttcttatcgttcatttcacgaacctccatatacaagctgatttactcttttatacgaacagccgctttagaagtttcaatattttcccttcccggaacaccagtcagtaaactgccgttcaggcagccgcggaggtttaatgaaggtcttttattcgcacaacactgtgcaggcttcgaactcaacatgcttctcgtctttttttgcgccggcaatttccatagtcgaaaacatcgcacagatgacggctttgtattcgttcatgacggtttgaatttcaatcagaaaccgttcggatgaagaggcgtattccgttacgtattctttcattttgccgataatatcatctgcctgacggatgaagccggccgcctccaagtcactctcaaactggtttttgttgatcatatgaatatgcatttttcaaggcccctttcagcagcgttttatggttatatccactgtaaaggacaggcttggataaacttttaataaaatatgaacaaaatatgaattggctcatcggcctgaccggcgggctttcggctgtgctccgtttcatttggactacctgaaataatgacttctttactctatgaaaaacagctcatatatgatctaataccagtaaaatgaacgttaggaggcggcctatgtcagcagcaggaaatcggcaaaaattttgggtcatggcgatgcttatagcggtctttgccgtgtttgttttctctttttccgagaatcattcacaaaagaactggcacacggcggttgaccaggcgtcagtgaatgtcttcggccagcagatctttgaaaaagaccgtctggcaaaaacactcaacgcacgtgaggcagaatctcttctgactcttgtgaaacttgcaaatgaagaacatcacatcatctaaaagccattataaaaagcctgtttccctttggcagaggaaacaggctttttccatgtattattgagcatgtttttgttcaataaaccggtcgatccgggccagaacatcctgcatgtccatacattctttaaagctttcattaatggcttgaatgccttgtttgtattttccgttatgcagcacttcttccgcggcaagctttaccttttcagcgctcacttcatctttttgcactgtacagcctgcatccaattcagtcaggcggcgcgcaaccatcggctggtctttatcatgcggaataacgaccagcggcacttgataatgaatgccttcatttacactgttcattccgccatgcgtgacaaacacgtcggcctgctccagcacttcaagctgcggcacgtacggggcgatgataaagttttccggcgcctgtttgattttcgacagatcggctttttccccggcggcaatgactacttttccttcaaaatctgagaacgcgtctatgcacagattgaaaaacgcttccgtgtccccgagcaccgttcccattgagatataaatgactttttcattctttaatgagtcaatcgggaagtcgacgcgcccttttctcttcggaaaactcggaccgataaataaatactcatctccgaatgtctcactttcgggctgaaaatatctgcttgtatagacgacgttcaattcacctgtgttgttcataaattgaaccatgctgtcaggggcgacaccgtatttgtctttcatctcggccaacagctcttcacattccctgtccggctgaaacggcacgcccgattccggatggagcggcagtattttcagacggtcttcattgaacaggaaggatgctgaagaagagatgccgggaatgttgagataatcccgcaccaactctcccgcaccaaatttatcataatagacggcgtcgaattgaatgtcctctgccagccgctgcacaatatgtaaaatctccagtgacgttttgatatgaacctttaaaaatgcaagtatgccggacggactgccgggatcaatgggtgtcattctgagcagatcgctgtgaagatgaactttcgctcctactccttccagtctgcttttgtatttttccgttgagatataatgaacgtgatcgccccgttcgctgaaggcctttgtcatacccaaagtcgggtttacgtgtccttctgcgggaaaattgatcatcagaatatgtttcgccatttttcaaactcctttgccttttttgcgtctcttccatatccatcataaatgacgcggaaaaaatcatgcaaggaacattcgtcaggtctttatgacggttcgatgacatcggcaaaaaaagacaaggcttttcaccttgtctatcgtgatgattcgtctgtttcacccgctttgagcacacctttcagatgttcttcatcatgcttgagatgctccgtcatatattgcacggcttttgttttatcgcccttttttatttcttcaaagactttccggtgctcatgcaggataacctccgcacggtcatctcctttaaaattaagaactctgcaaaaatgaatcagcacattgacatgctcaagcagcatggccagccggctgttgcggctgaaatccacaaggagccgatgaaacgactcgtttaaggaaataatctcagtctctttgacgcctttattgatggcttcttccgtctcccgcagctgtttttcaatgaggtcaatttcactctcagccgcttcatcaataaccagttcgaccgccaatgattcaagtgacattctgatttgataaatctcttcaacatccttaacggacaaagaataaatgacaaagccgtttcgatcgtctgccgtcagaagcccgtccttttcaaggagccgcatggcttctctgaccggcgaccggctgactccgaaatccttcgccagctgagtctcattcagccgttcacccggtttaaaaatcccgtcaaatatcatttttttcaattgggaataaaactgcagataatacgggattggcttatctaatttaaaattatccatctttcctacctcttcatacaatttaggccttattgttaccaagatcatataacagtttatctatggaagcaacattccagagcttgtcagcataacggaggtgccgtaatatggaagtatagttggtcgagggtattccgtaaaccgaaaacaattcattcggaggtgacggaaacatgaagacatactagattgccggcataccgggggacggtgtggggaaagaagtcgttccgcaagcggagcgggtgttgaacgcgatcgccgaattacatggaggcattgcctttgatttcacttcttttccgcggagctgcgagtattatttggagcacgggactatgatgccggatgatggattagaaacgttacagcactttgatgctttgtttttgggagcggtggggaatcaaaaactcgtccccgatcatgtttcgctgtgggggctgcccatcaagatacgccggtaactacatctccgattttgatctgtaaacgtccgggaaggtgagtacagctctgtcggcagcagcatctatcagggtgaagatgaaatcgccattcaatacgcggtcctttcccggcggggtacggaatgagtgatctgttttcgaaccggcagcgttcggctggggttttgacaaagaaatgatacaattttttacagagatagagagagaaaattgtatgtcaaatcgcagcaggggaactgcaaggaaacggtaacccctcctttaattgtggtgaaaaaagaggatacacctacaagacaggtcgattaagatggtctattggcatcttacatccgcaaatatgtctttacacaaaaaagttagagaggtaaaaaatatgaaaaaaatattttacttttttttgatattatatataattatagtattattacttaattctgtatttgacttaagtaatgtattattaactgttttgtttgctatattcgttggtgcattagtgatttatagcattgcgaaacggagtaaaggtgatgagagaaaaaagtgttaaagaaggttactaaattatttatagcggggtgtattctcgctactgtgttgtctgctttcgctccaagttctgaagcagcttgtcgacggacaaatcttgggactcagtgtgataatgatgttcttcttaaaaaaagggtaaaggtttattacacaaaaaatcaggtgaaaaaagtggtttctagatataacagcatggggtctaataaagggcttattctcggttatattattgggttggtacacccttctactggtttaagtgttttaatgtatcaagtaggagctaataatatgattaagccttttaaaactgctaattctaagaaaaagggtttagagatttcttacacggttaccgtttataagtggtcaaatgcatctactaaggtatctggagtaaaatataaatatagataagactaagtaatacataatgagcaggcgatggcctgcttttttttattacaggagaaatgtgcaaaatgaaaaaggaaaactgaagtggaaatcgatctgcatgtcagggagcctgtgtgatgatgcgttcccagagtgagtcaacagtatgcggattgcagggaggattaaggagttgactcactcagtcagcattcaaacaaacttgtttcaatcggcggaaacacgtcacaagcgcgacgaaatcaaacggtattgttcactcgatgccgttctgggatgacatctttaaagaggtcagccgggagtacgccgggatcgagacggattcccagcacatcgatgcactggcggccttctttgtcacgcagcccgaacgctttgatgtcattgtcgcttcgaatctgttcggagatgtgctgacagatatcggcgcggcgattatgggaagcgtcggaatcgctcccgcagccaacatcaatgtaaacggcaaatatccttccatgtttgagcctgttcacggctccgccccggatattgtcggaaaaggaatagccaatcctatcggccaaatatggacggcgaaattaatgctcgattcattcggagaagaggaactgggccatctcctcttacaatctattgaaacggtcacaaacagcggtattctgactcctgatgccggcggaaaacattcaacggaagatgtcacttccgctattatttctcaaatcaagaacagataatacgaaaaaaccgcgggcaggaaaactgcacagcggttttttcgtctcagacgggacggagcgcgcagaaacaggccgattcacctgtgaagcccgcaatacggcctgattgatccttttctacagaaaaaaaccgctgtatatcacaaggagcatccagcatctgtttttccagtaatgcggctttctcttcagtcaggcttgcccgttcacaccagacggtaaattgaaatggtttcaaaaagcagacagcggattcaatccggaagccggctgtctccagaaaacgaagccattctgtttttttccacgcccgaaagtggctctgatcccgtttcttttcaatgtcattataaaaatggtcatattcatccttttcaggtgcggtattgtcaatgagaagcagtctgccgcccggtttgacaacccgaaacgcttcatgaacaaaggctctgacatcgggaaaatgatgcgccgcgattctgcatgtgacgatatcgaaagcagcatcggaaaacggcatcttttcagcatcgcctttttcgaatgacacgttcgtccatccgtttccggttataaatgcttcagcggctgctaacatttcttccgtgaggtcatatgcgataacagagcgtacgagaggagcgagagcgttagccgtatgtccgcctcccgtcgcgatatccagcacgtccatatgcttttcggcaccggaagctgaaatgagatatgccaaatcctctcctgcggcgtatccgggactagtcacatatttcgcggcgtttttagcaaattgccgctgcgcctgctgtttaattgaatcctccattatacttgggcccccttttctttctgcttgctgccttaatcaaaataaacgggttcgtccggatgtttgagatatgcaaacatcttttcaatctgactttccgtattgcgggcttcagatagcggcggcagttccgtttccgcaaaaaagccggccgcgcttgtttccgttccctccctgagccggccgccgatgatctcgcatcggataaacactttgtaaacgtgggcggcggacggcgggtgggaatggcatttcttatccattacagctaacagtttaacgggctttacgtcgattcccgactcctcttttacttctttgacagcggtctcgcccggtgaaatcccgatatcagcccatccgcccggcagcgcccatctgccgtcgcttttctctcttaccattaatatgctctgatctttaaaaactgccgctctgatatcaactttcggagtgggatagcccgtgtcaccggcgaatacgtctttgatgatgcttttgtcgatgccggtatgttgcgccatgatatccacgcttatttttcttatttcttcaaatctctcaatatcatatatgtctttggaataagccagccccgcttgcgccgcggattgaagctgttttgcccattcaagccattttggctccattttttccaccgcccgttatgttaattaaacgaaacccgaattgcaccttgagagtaccccgtttctgctccttgttttctgtttatggcggagcgaatcctgccgggaaatcagaaaaagccattcatttgctgaatggctttttttcattttctatttttctttcatgacgagaacgacgcctgaaacaataagggccgccccgatccagaaggttcctccgatcgtctctcccagcagcagccagccgagcaatgtcccggaaagcggctgaaagaagaaaaacagaccgccgcttgccgcattcagcaattgtaatccgcgattccaaagcatgaacgcgcaggcggttgagatcacacccagatataaaagtccgccccatatctcaggccgggcaagctgagacaaaggaatctcccgaagcgggccctctgtaaacggggtcaggatgacaaatgcgacgcaaatggaatacgttgtgacgacaagcggtgagtaatggccgggaacccgtttcatcagcacggacatcaaagcccatgtcagcgccccagccagaagcgagagaccgccgaactggctcgacatattgagatctccgttccccacaatgagcaatactccgatcgtcgccagccctgtcgatattccttttttcagcgttaaccgttctttcaaaatcagccgggcaaatacaaccataaatgcgggagtggatgccgtaataatcgcacccatctgcgcggttgataatttcgtgccgatttcctgcgtgacgatcgaaatcgtgttgccgatcaatccgatcgcagcgatcagtaataaatcacgtttatgaactttccaggattggcgtgtaaataaactgagaatcaaaagcgaaaaaagcgccaccgcatatctcagccataccagttcaagcggcggaatgaccgctaccactactttaacgacgacatacataccgccccagatactggcggccaatgccaaataaatcgaaccgaacaatgtatttttcaatttgatgcaccctccgttatcatattaggtcacgtcatatgccttaacggagagaagcgcagtcactttcctccattaagggcggagaagtgctgccggtacatcatgttcaaataagggcgctagaaacatatcgtttttcacctcaattgcaatctgatttttctcattatacaaggtttgtcagaagacgtaaacgaacggcggcatcggctttatcgattgcggacttgcagctggattcttgtgatctgattgtcaaacccgtccgccacaacctcatcaagcaaatattcttcatatgcataatcgcccatttccagcccatactcttcaataaactgcatgatgctgcggtaagccgcttccgcttcatcccctatttggtacccgacggcataaagccctttcggcttgatatggaggtcattattctctatgccttcttctgtcttcatataaaaatgggtgtagttgtagaattcttttttcagaatctgctcccgcgcaaacagtccgccgaccggatgcccctgatcgagttcatgtacccgcatatagcggatcaattcggaaatggccgcagtgtattgccgttctggcaaatggagtacgggtcgtcctatcataagtgtctcttcatctaatcgctgcaatgagacggaggagaagtctgtctccaaagcttgttcggtcagcttcacctttgtctgaatcattctttgcaggtgctccagctttttgattttgctttcgatttctgatgatttctcttttaaaagcgtgatgataccctcaggggttttgtctgttaagagcggtttgatctgcttcaagggcacgccgacctccttaaacagaccgataacctggaacagttcgaattgatgataggaatagtatctgtatccgttcgcttttttgatttccggagaaagcaggccgatttcgtcataatggaacagggtttgtttttttacgtggcacagttttgcaaattcacccgttgtgaagtattttctgacgtcttcgctcataatgcctccttgactatacggtaaccatatcctttatgatgatcattgtatccgagagaaggctgattcacaaatggcttacgcaatgaaagctttaccgtctcagaaaaagcagaagaggagtatcaagtatgacgattgaaatcagagcagtcacggaagaaaaccgtgctgatatactggcgcttcatgtaagggaaagccagacttcatttattgaaaccgcggaagagtgcttacaagatgctgaggattgccggcattatcagccggccggtctttatgttaacggggaattagtcggctttgccatgtacggatggtttccggaatatgatgaggaaaatgaaaacggcagagtgtggcttgaccgtttttttattgatgaacgttatcagggacgtggattgggcaggctgttgcttgatgcccttatccgccatctcgttcgaatatatgagtgcagacggatttatttaagtctgtttgaagataacgtgcacgcattgcggctttatcaaaaattcggcttcttattcaatggagagctggactcaaacggggaaaaagtgatggtgaaagagctgtaaaccctctgtataaaagcgattcggcttcttgccaatccctcaaatttgaggtaacataaagataatggacgacggtcgacggacgacgatcgattgttaaaaacctgataaagcggatctgaacatggtgatcaggcatctaaatggaggagaagattgtgcttattatactcgttatgttccttctcgggattattctagggtttatcggcgcggggggagccggttttgtcattgcacttttaactatactgtttcacgtaccgattcatacggctttgggcacctccctcgccggaatggctttcacaagtttatcgggggctttcagccactaccgtgaaggcaatattcagatgaaaatcggcctcatcgtcggcgtttttgcggcattcggttcgtttttcggggcaaggcttacttcccttatccctgcagatttgctgcattacttgacggcgggcatgctgtttttatccgctctgcttattttagtccggttatttattgtaaaagaaacacatgaagattccggacggcaaagcaatctgaacatatgggtgaaagccgttgtactcggtatcatcgcaggaatcttgtccggaacgttcgggatcggctctgcccctttcatccagatcggcttaatgattcttttgcgcttatccatccgccagtcggtcggcaccaccatgcttgtcattatcccgcttgcggtcggcggaggactcggttatgtgacggaaggatttgtcgattatatactgttggtcaaagtgctgatcggcacgatgtgcggcgcatatgtcggagcgaaattcaccaaccacgtgccgaaagtcattctgaaatcagccatctttttaacaccggccatcgccggtctcatgcttttattttaaactgaaacgggaggcggccgcctcccgttttttctgttcttcacctgttttcgaagagctttttcagctttgcttccgtttcggtatgatctaccggcgtatacacactgcagcgcagatcactgttgccctgaacctgaaatgaagtcaggttaaagaccatttttcccgccttcgcgtggcggaactcaattaatacttcgggtgccgagctgacttcgctctcattccacagcgtatgaaattccgaatacgttttctccatttcttctataaactgagaataccacgtatcagctacatactggccgtagtacgttctgaaaatggcgatgaatcctttcacaaagtgctcccagttcacagctaaacttcttaattcttttctggaaaacaatagctctatgagattccgtttttcaggaggaatttgttcaaaatctaaaaacacgtgagccgcggcctgattccatcccacgatatgacagcgcctgtccgagataatggtgggacaataacggagctcctgcaggatttttgaaagcgacgggctgataaccgcttcttcctccgcggcaaacggctgcttcacgccctcctcaatggcaagcgcgtataaataatttctctcatctttgttgagctgcagcgcatcggaaaccgcgtccaatacggctgcggacactttaatgtctctgccctgctccagccacgtataccacgtggtgcttacgcctgctaattgcgcgacctcttctcttcggagcccgggcgttcttctccgtgtgcccatcggcagcccggccatctgcggagaaattttggcccgctgcgtttttaaaaactctgagagcgcctgcaatcttccttctggtatcataccgaatctctcctctcttaccctggtattcattatactaggataatcaacaacttgtaataggataattgcgagttacaataaatacataccgaaggaggaatgaccatgaaaagagttgtgatcaccggaatgggagtgatttcacctctcggcaatgatgtgcatacattttggaaacacctgacggaaggaacatcgggaatttctctcatcgattcgtttgatgtctccggctccaagacaaaaatagccggcaccgtccgtgattttgacgcagaagaaagatggggcagaaaagaagcgagacggcttgaccgtttcagccagtttgctttagcggcagcggaacaggcgcttgaaagctccgggattcagctcgatcagattgaccgtgaacgcctcggcgtgtacgtcggctcgggaatcggcggcatcacgactttgattgataacgttcatactttaaatgaacggggagcgcgaaaagtgagcccgagccttgtccccatgatgatctcaaacgcggccgccgctcaaatcagcatcagattaggcgcgctcggcccctcactttctcccgtcaccgcgtgttccatcggcaatacgtcgatcggggaagcattcaacgccattcggaatgatgacgcagatattatgtttgccgggggagcggaagcggcgattacgaatttgtcattagccagcttcggcaatgcccacgcgctgtcagcgagaaacgaagaccccgccgcggcaagccggccgtttgacgctgatcgcgatgggtttgtcatgagtgaaggcgcgggcatcttagtattggaatcattggatagcgcaatcggcagaaacgccccgatcctctgtgaggtgctcggctacggcgcaagctctgacgcgtatcatatggtggcctcccatccggaagggacgggcgcatacctggcgatgaaaaatgctttgaaaaaggcgaacgtttcagcggaagacattgatgtcgtaagcgcccacgcgacaagcacaaaagccggagatctttctgaaacattggcaatcaaaacattattcggggagcttgcgtatgacattccggttacggccaacaaatcaatgctcggccacatgcttggcgcggcaggcggcgttgaagccatcgctctgacagaaagcctgagacacggcatcatcccgccgacgatcaatctgcagcaccctgattcggcatgtgatttggactatgtgtcagacgggccccgccatcaatcgttaacgatcggcctttccaactcattcggctttggcggacataattcggcgatcgtgctgaagaaatatgaatagcgggcatcaaaaaaaggagtgaatcatttcactccttttttgctttctccggttttgttgttaaggcaaaaaaagcgatggaaccgataacggatgtcgtgaacataattgcccccatcggcacggccgtcgcttcattcatccccacaagcggcgacacgatggaaccgagaagaagcggaagcatgccgagcagtgcgcttgcgcttcccgcgcggtgtccctgcttttccatcgccaatgtaaaggtgcttgtcagcgtcatgccgatcgtaatcatataaataaaaatggaaatcaccagtgccgccagcggtccgtgaatgatcgtcatgacgagcagaacggcagtcgccgtcatcgctgtaatcacgccgattttcagcaggcttttttcgtgaatgatcccgccgaaacggccgatgataaagcttccggtaatgatcgccagaccgtttatgccgaataaaacactgaatacctgaggcgatactccgtaaatatcctgatacacgaaaggcgttccggagacatacgcaaagctcccgccgtgaataaaaccgaccgtcagcgcatagccgataaatgaccgatccttcagcaggcttcccattgtccgcacggaatttccgatggagctcggaatccgcttttccggcggcagggtttctgtcagcttgagcgcaatgatgagaacaagcaaaaacccgataaaggttaaaaacagaaaaatcgtatgccatgatgcaaacggaagcaataaaatcgcgcctcccgtcatcggcgccaccatcggcgcgacggcggtaatgaccatcagcagcgagaaaaatttagaaagttctcttcccgtaaacacatctctgacgattgcacgggataaaacgagtcccgccgaagcggtgaatccttgaagaaaacgggcaatcaccagtgttgaaatgttcggtgcaagcgcgcaaaacagagaaaacaaagcaaataaaaaaatacatagcaataacggttttcttcttcccttcgcgtcacttaacgggccgacaacaacctgtccgattgtcagtccgatcagacaagcggttaaactgagctggacaagcgaagcgcgggcgcttaaatcttcggcgatttcagggaaactcggcagatacatatctatattgagcggccccagtatcgcaagcattccgagaagaaaagccagcgcaagccgctccttaccggtcggattatgcagcatatcgttcccacctttcctttgtcaatctctcaaaacatttgtatattgtatcataattttttctttatttttaaaagttttcaaagggcataaaaaaaaccaagggctgtaacagcccttggttccgggtcacgcggtaaaaggttttacgcgtgtttttctttaaatgcttttgcgtattgatcagccgctataatggcgtccgccacgtcgtcagccgtcacgtcaaaagcggcatgaatcgtttcttcttcaatcgtcgcggcttctgccactttcataatgtcctctttagatgcgtctttcattttgatgtcttcaagtgtgacaggcagccccaagctgatataaaacgcgatataccgctcaatttcctcaagcgaacgtttttccagcgccaattgaacgagcgtgccgaatgccactttttcaccatgggtcaagtgatggatttcaccttcaagcgcggtaaatccgttatgaatggcatgtgccgcagctaagccgccgctttcaaatcccagtccgctcagaagtgtattggcttcaaccaccgcttccaatgcgggcgtaacggctttcgctttcacagactcataagcgagacggccgtatttgaataataccgcttcacatttttccgcgatagcctctccggcgattgtcggaattccgcctgccatcgttttaccgccattggcgatgacactgcgcgcctctatccacgtcgccatcgcatcggcaatccctgatgctaaaaagcgcggcggagcttccgcgacgattttcgtatcgaccagaaccaagtcaggattcttatgataaaaacgatagttttcgaacgcgccttgttcagaatacacgacagacagcccgcttgtcggagcatccgttgaagcggccgtcggcacgataacggtgtagccgtttatttcatctgatacggctttggccgtatcaagcgttttaccgccgccgactccgatgacaatagtcgcccctgctttttctgcgatgccggcaattcttttcatttcttcctgggaggcttcgccgttgaaaaccgcctcttcagaagagatattgcttttctttaattcagccgtcaccttgtggcccgcgatatcccatacggttttgtccgcgatgacgacggctttttcaccaacgccctccagatgtccgccgatcgtttcaatggcgttttttccctgcacgtatttggccggactgataaaaattcgttccaatgtcatcatcccttcttcgttgtctctcattacatttctcttattgatagagcggaaatgaaaactcttctgatataattcctcgttttaacttggtttaaacctcatatacactgcagaaaatcaattttcacggcattgacaagatgtgaaggtgtctatataatcttcgatattgaagctgatcattctttactgaatgaacaaacgagattgtgaatgattcgtcttaaaaattatttagttctgctggataatttttgaggcgtttttgttttatatatatttttgactgcggaggaggtttgcacatgaagaacatttgcaaggatatactgatgattatggccggagcctttcttatcgcggcgtccgtggaatttttcgtcatcccgaatcatttaggggacggcagcaccgtgggaatcgctctcgttttatattatcttttccatatacctgcaagtattacgactctggttgtaaatttgatttttatcgggctggcttataaatttttaacgaaaaaaacgattttatacacgatactcggtacgggaatgacttctgtttttctcagcatcgtcagctttattccgttcggcgtgcacgacatggtgctcgggattgtattcggcgctctgctgatgggagcggggctggcattgatctttatcgctgacggatctaccggcgggaccacgcttttggcgtatttattgaattacacaaagggctttaacatctccaaaagcatgttttatatggattgtgtcatcattttcgcatccgttttagcgatcggaatcaatcatatgctgtatacgtttatattcgtttatctgtgcgccaaaatcgtcgatattgtcattgagggtttccataataaaaaagccctcaccattatgtctgaccaatacgaagaaatcgccaaagccatcacctccgagtacggcaacgcggcgacgattttttacggatacgggtattacggcagcaaagacaagcgcattatctatgttgtcattaaaaagaacgaattgctgaaaatcaaaaaacatgttcaaaaaattgatccgaaatcatttatcgttattcatgaagtaaaagaagctgtcggagggcaattcgggtttacaaacctgcccgccgccgcaaatgaaaaataaccgcctgcagtgtatagctgcaggctttttttattcggctcttccccgctcaaaggttttttacatctttcaatcgaagtagtaaatgaaaccttttttgatggaggaacataaaaaaatgaatatcaaaactgaaaggctcgtcattcggacatttgaaccggaagattggcaggatgtctatgcgtacacctcgaatccgagtgtcatgaaatatataccagagggtgtctttaccgaagaagatgccaggaaattcgttactgaaaacagcggtgaacatgccgggaagtttcccgttttattgaaggatgagaaaacggtcattggccacattgttttttttcagtattttggcgatcatacgtatgaaatcggctgggtgtttcacccggaataccagggcaaaggatatgcttcagaggcggcgcgcgccgtgctggcattcgggtttaacaagatgaaattacaccggatcattgcgacatgtcagccggaaaacatggcttcgcaccgggtgatggaaaagatcgggatgaggcgggaaggcttgtttaaaaaatgcatcccccatgataatgaatggtgggatgaatattattatgccgttttagaagaagagtgggaagcctccgatctggaataaaaaggcttataccctttgcttttacagataagtgtgtgctacactgttcgtaacaaatacgaagggatgatgggtggacaatgattaactaatcttattttgaccgtttgaaatcaaatatttcaaatcagaaaaaataggattagtctgcccattttctatacgatacgagaaagctatgtaaaaatagcttatttgatcacgcacaggtacggctaatccttccaaatcaattgggaggattttttgtcctccctttaaagcgagggattgacatatgaaagaaatgttaaaaataagcggcatcagttacgaaatcaacagcgttcccctttttgaacagatcagcgcgagtgttcagcaaggcgacatcatcggtgttatcggtaaaaacggcgccggcaaatctttattgctgcaattgatctgcaataaaaaagcgccgtcacaaggacagatccagatgatgcaagatgtgaacatatatatggtggaacaagaaacggaagcttatgattccggccatccggagcctgcggaggcagccttgttagaaaagtggaacgtgcccgcacgcgccttttcgcaattaagcggcggagaaaaattgaaagcccgtcttgccaaaggtttctcctcctcaagcggccttttgttattagatgagccgacgaaccacctcgatcagcacagtttagaaatactgcttaatcagatcaagaattacaaaggcaccattattttcgtttcacatgatcgtgcttttatagatgcggcggcgacaaaaatctgggccatcgaaggaaagaaactcattgaacataaagggaattattcaagctatatggaggtccgcaaacagagaaggctgacacagcagcgggaatatgagaatcagcagcatatgatcagacggattgaagctcaaatgaacgagctgagcgcctggtcaaaaaaagcccacgcccaatcaacgaaaatagaaggctttaaagaatatcaccgcgtaaaagcaaaacgcacggacgcccagattaaatcaaagcagaagcgtcttgaaaaagagcttgaaaaagcgaaagcagaaccggttgaagcggagtatgaagtccgtttttccattgagcaccgcaaaaaagcgggaaagcgttttttagaagtaagtgatgtcacaaagtcatatgaaggccgaacgctttttaaaaacgtgaatttcactgtgatgcacggtgaaaagatcgcgattacaggcccgaacggcagcgggaaaacaacattattgaaggtcatcctcggtcaggaaaaagcgcagggcggcatatggatttctccgtctgcaaacgtcggctatttaacccaggaagtattcgaccttccgcttgataaaacccccgaacagcttttttacaaagaaacgttcgaagcaaggggaaatgttcaatccctcatgaagcatttaggatttaccgcagcgcaatggacggaacccatcggcaagatgagcatgggagagcgggtcaaatgcaagctgatggcgtttattctgggggagaaagatgtgctgattctggatgagccgacaaaccaccttgatctgccgtcacgcgagcagcttgaagacactttggcccgatacgacggaacgctcatcatcgtatcgcatgatcgttactttgtcgaaaagacgacggacatccggcttgatatctcaaacggcagcgtccgaaaacaatggaaagaatctccctccgtcagggatgatgctgaagaactgcgattaaagtttgaaaccgaacggcaggaagtcctcggaaaactcagcttcatgactccggctgataaacaatatcgtgagcttgatcaaaagttcaaagagctgacggaagaaatcaagaagttgaaatgaatgtaaaaacccgtgattgtcacgggttttgttttggaaagttcacgtattatgaagaataatttcaaactgatttgtacaacctacgttcagattcatacgagaaggttcagaaagaaaggttcaggtgaacgcagaatggccaaacgcatcggaattacgggaaacattatggctgatcaatccggccctttcccgggttataatcgggcatatgtcaataatgattatattcagtctgtttctgaggccggcggtgtgccgtttatattgccggtgattcaagagacggcgcttttaaaggaacaggtctctcatgttgacggcatcattctgtccggcggccaggatatagacccgctgttttacggcgaagaacctttacaggctttaagaaagacctttcctgatcgggacgcctacgaaaaggagctgattctcacggcggttgctttagaaaagccgatactggccatctgccgggggatgcatatgttaaacgttacttacgggggaactttatatcaagacctggcacacgcttcgtttgctgacattaagcatgaccaagaaaaagatccgccgttaaaaacccatcatgtttcttttgaaaaagggacacgtctccataccttgtttggcgattcagcgcgggtgaattcattccatcaccagatcataaaagagacggcgccttcatttaaagccgcggcttatgcgaaagacggggccattgaagcgattgaacgaacgggtgaattatttgtcgtcggcgtgcaatggcatcccgaaatgctgacaaaaaaacatgaagacatgaaaaagcttttttctctgttcatgaatgcggtcagcacataaaaaaagcagatcataacgatctgctttttcattttattcttccggtttctccggtgttttgccttgtgtcagcttatggccttcgatatccacgttcggaatgattttatccagccacttcggcaagtaccaggccgcatgtcccatcagcttcatgacactcggaatgatggtcattcttacaatgaacgcatcgaaaagaacaccgaaggtcattgccaaccccatggatttgatcgtagagtcccccgcgaagatgaatcccgcaaagacgaaaatcatgatcagtcccgccgctgttacgacaggtccgctatgtttcaatccggcatggatggcttgtaccggattttttgttttgacatattcttctctcattctgctgacaaggaatacttgatagtccatcgccagcccgaaaagaataccgatggctaaaataggcaggaaggcgagaatcggacctttttccggaatgctgagcaagccggtgaaattcccatcctgcagaacgaataccgataacccgagtgtagcggtcatcgtcagcaaaaagccgacgacggcggcaagcggcacgagaagcgagcggaaaacaacggtcagcaatacaaacgcaaacccgacaataagaatggcgaatttcggaatcgcatcgtttaaccggtctgaaatatcaatattcaccgctgttgacccggtgacgagcaggcggatgccgtttttgtctgatcgtttccgtatatcctgcactaactctttcgttgccttatcattcggcccggtttcaggcactgccgtaatgatggcataatcccctttttgattcggcatggcaggtgtgacgctcgccacattgtgcaagtcctttatttctttcacggcgtcttgaaatgcttcacttttattccccttgactccttttgcatcggcaacaattgtcagcttgccgttaaagccttcgccgaatcctttagacaacagatcataggcgcggcggtccgggctgtctttcgctttcattcccgcatcaggcagccccagttctaaatgcatggccggcagactgatgacagctaaaagaataatgctgaaaatgcttaacagaataggcttctttgtaacgaagcgtccccaggcattcgtgtcggcgctttccttttctttcttcttgtttgatttcggaatcatccgttttcctgcgattgacaacaccgcaggaaccagcgttactgatgccaatacagccatcagcacactgagtgccgcagtcaatcccatcgcagacatgaacggaatgccgacaacggtcaatccgcaaagcgcgacgatcacggtcagtcccgcaaaaacgacggcgctgccagccgttcccgcagctttagcgatcgattcatttttttgtacaccttcgcccaaaaactgacgatgcttcgtaaagataaacagcgcataatcaatcccgacggccaggccgatcattcctgataatgagagactgaccgaggctatcgtaaagatctgtgtcccaattaacgtcagcgcgacgcttacacctaacccgatcagggccgtgacaatcggcagccccgctatgactaatgaaccaaacgtaatggccagaacgacgaaagccagcacaacgccgacaatttcagatacaccgccggcttcaacaccggcccccggcacatcgccgctgagctccgtctgcaggcccttgtctccggcggcggacagactgtgtttaatatgtgaaacagacgcatccgtaatgtcatccgccgcttttttgtacgtaatatcggcatatgccactgacccgtctttagaaatggttcctgtttcaaaaggatttgcaatcgaagcgaccgaatgatctgttttgatcttctttaatgtctcttcaatcgcttgtttttccggttttgacgtcaatttcttcctgtcttcagctccgaaaataacccgtatgcttcctttatcgggcccctttgaaaattctttttgaatcacatccatcgccttttcagaaggtgtgtcgggaattgacatatcctcagaaaaagcaggttttaacgagatggcgatcacaatcgaagcgatcagtatcacgagccacgcactgatcattttgaatcggttgcgggcagaccatccccctaatttatataaaaaaccagacatcgaatactcctctccaatcattactttctgcctaattgtagttcacattcacataaaaaaaacgtacataggggcatgtacgtttgggcagtttttcattatatattcagtttcagaatgcctttttgcatagcaatggtgacggcttccgtccgcgaatcagcgcctaatttgttataaatcgatgttaatctcgcttttaccgtccgctctgagattcctaaatcgaaggcgatcgctttgcttttatgtcctttcgcaacggcttgcagaactatgatttccttgtccgtcagctgtgtttcattggcatttgcccgttccattttcttttcccggaaacgccgcaagatgtccggctgcagaagcacttctcccctgaccgccgcatccatcgtatgaaataaggtttctgagcttgtgtccttcagcagataaccgttcgcgcctgattcgatgccttctatcatcagatgatcttcattataggtcgtcaaaataataatcggcacatcagaatgctcttttatctgtttaatggcttccagcccgctcatttccggcatgtacagatccatgagaatgacatcgggctttagttccgctgcgaggcggacggcggttttcccgttttccgcctctcccgttatggtgtaatggtcatttgtttctatcaaaagcttcagaccttctctgacgacaagatggtcatctgctattaacactttatacatgttccgcttctccttgaattggtatgatgatctcaatttgagttcccgctgatctggcgcttgttatacggaaagtgccgttcatcatattgacgcgttcttgtatccccagcagcccgtaatgtccgctttttctcatttctgttccggcatcaaagcctttcccgtcatctttgacggttatgcggatctgtccctcttcttcctgaacggacacccagacattctttgcttctgcatgcttggcggcgttagtcaggccttctccgatcatgtaatggcaattctccgccgtatgaacgtcaagcacatgatgcacgctgtaatctaaaaaacaagacagcccggaggcttctgtaaaatggttgatttgttcagtgatgctttcttttaagaacccgatctcttctgatttgctgcgaaggttgtcaatggccgagcgcgcatcagccaatgtgcccttcactctgtccattgactggctgatgatgtctttcgctctgtcagtgttaccctttgaaagatgaacatgcaccgcttcaagctgcatatgcaagctgaccagcccttgtgcaagtgtatcgtgcaagtctctcgccatccgctgcctttcgttttgaagcgtcagctgtttcacttgccggtgagcgagctctaatttttcaagcgtcatctgtgttttgattttttcatcaacttgcgcgaaaaatgttgccgcatatgtgataatcacgatcatgatgggagcggcgataacgatgaaacgaagcagatgatgcggatgctcctggtgcagggctgctatggacattaaaatgaaaagatagagtatgagcggcgttttgcccttatccgccattccgataatctgcccgattaaaaaggcatagagaccgatgaccgccgcgatatagccgccggtcatcaagttagccgatgtatatatgataaatccctgtatgatgaaataaagaaacgtttttttcttgacccagcgataggaatgccagtgcagcacagcaaaaatgacgatcaatatcgtgaataacagcagcaataaaaccgtccagctttcataaatgtactgcaaagagactgatgcggcatataccataaaaataaacgccagaccgggcacccgaagcgcaagcatatgcaatgagcgtctgtcacgggagacatagtcttcttgatgttttgtaccaaacaatctctgtccacttccttttagccgaccggcctcacgatgttttattctatttgtcatcataccataatcgcctgcttctcaccttccccttctgtcctgcttgacgggtgaaagaaaaaacagcctgcgggattgttcgcgggctgcttttgttcatatcttttttatgacctttcccgggtttcagcggtctgtctcccgcgcggcaaaaccgcccgcgcatcagaaaaacgttcaggacaccgacagccattccatgtgaacaagaggaagcgattgtgcttcctcttttttaatgtaccgtcaaatttcttctctctttttttataaacaaaatttgtaagactagagctcttttctcaggggaaattaattatgtaattgagaagaggaggtttaaaaaacgattatggaaaagcgtgaattagcggctcacgagtcgctggacttacatgaaatcattaacttcaagacgctttgtgtagcgaaatccaagctcatgcaagggcttgtgtttgatcaggatctgaaaacgttaatggaaaaagacgttcagcaagcctcgcaaaaccttgctgatctgcaggcggtttatgaacgggcaacgtttcaggctcctgttcctcaaaaccggccgacttcgatcatcaattgaaaggaaggtaagcatcattgaaccatgaccatttagatccaatcaattcattacacgtccctgaactcgcagatatgacattcgcaatggattttctcatacgcgcaaaagaaggcgtcagaaataccgccgttgctttaacagaaaccgcctcgccagatgtaagagctttgctgcgcaaacagctcatgcaaggaatcgcgatgcatcaggaaattacagacttgatggtcagcaaaaagtggtttcacccgcatgatctgagcgaacagtataaactggaccagctctctgcgaaaaataccctcatggtcggaaacatgaatctgtttcccgttgaaacgaacagaaaagggatgtttgaccgcacacctgatgaacactaacactggaggtattacagcatgaaggccgtaacgtatcaaggagtgaaaaacgtcgtcgtcaaagacgtgcctgatccgaagattgaaaaacacgatgacatgattataaaagtcacaagtacggcaatttgcggatcagatttacatttaatccacggactcattccgaacttgcaggaagactatattatcgggcatgaaccgatgggcattgtggaagaaaccggtcccggcgtgacgaaagtcaaaaaaggcgaccgcgtcattattccttttaatatcgcctgcggagaatgcacttattgtaaaaatcacctggaaagccaatgtgatcaatcaaatgaaaacggcgatatgggcgcttatttcggctattcagggagtaccggcggctatccgggcggccaggccgaatatttgcgcgtcccttttgcgaactttacccattttaaagtccccgaaacatgcgaagaaccggatgagaaattgagtgttattgccgatgcgatgacaaccggtttttggagcgttgacaatgccggcgtaaaagcaggcgatacggtcatcgttctcggctgcgggcccgtgggccttttcgctcaaaaattctgctggttaaagggtgcgaaacgcgtcatagccgtagactatgtcaactaccgtctccagcatgcgaaacggacgaataaagtggaaatcgtgaacttcgaagaccacgaaaatacgggcagctacctgaaggaaatcaccaaaggcggcgccgacgttgtcattgacgccgtcggcatggacggaaaaatgacagatcttgagttcctcgccagcggattaaaacttcaaggcggggccatgagcgcattggtcatcgcgtcccaagcggtgcgaaaaggcggaacgatccagattacgggtgtgtacggcggcagatacaacggatttccccttggcgatatcatgcagcggaacgtcaatatccgatcaggacaagctccggttatccattatatgccgtatatgtttgaactggtgtcaaccggcaaaattgatccgggtgatgttgtaagccatgtcattccgctcagtgaagcgaagcacggctatgagatgtttgacacgaaaacagatgattgtattaaagttgtactcaaaccttagagaacggaggctacagaaatggccagcgccttacatgaattactcgaaattcaggagatggcttcttttaagtcactttgcctgacgaaatccaaaaccatgaaagcgctcgtatccgatccgcagctgaaagaaatcatgcagcaggatgcggatacatcaacaaggcaattgcaggaatttgcctcgattttatctgatgcaaagcacgaataggagatgaatgacgaatgaatccgattattgaatacctgacggggatggatgcactgacagaccaaattgtcgctatggatttattgaattcggcaaaaagcggagtcagaaactatgcgatggcggcgacggaagccggaacgcctgaagtgaaagcgatcctcacccgtcacttagaagaagccatcgacatgcatgagcaaatctcacgctatatgatggaaaaaggctggtatcatccgtggaacacagatgaacaagtccggtttaatttgcaaaatattgatacggcgctccgcctgcccgtcctataaatgttttcctgctgagacagcacctctggctcagcttcagtatgtcaaactgagaactgcctttacagcgcccaggcaacgaaactcccgcgaatcagctctgcagcttctccagcctttcttcgggctgttattggggcttgcggcggtgattacgtgcgtggcggccgccgggcggttcgcaaatagagcgaagaaggcagaacaatttgttctgccttttcattattttctgccccataggcacaaatacttttcacccgattcgagcggcggttattcacgtagcttgaactcccttaaacgcactcatcacaagatcatgcacataggaatcattcacctcatcacctgtgatcaacaggcgatagaaaatcggtccgtaaatgagatcgatgcttacgtcaatatcaagattctctcttaattcacctttctgaattcccttttccagaaggcctttcgcttggaggcggcggggctggaaaaatcgcgtgcgatattcttccgccaattttgcatccagctgtcccgcaccgattaattccttaataacggttccttcccggctcgtcaaaaaccttgctaaattcgcggcgtgggtcaatatatcttgcactgttgatcctgtatcgggcacaggcagtctgtccgtagcggtcgaaagaaagctgtccatgataacggcagccttgtttgaccaccatttataaatcgttgccttactcactttggcacgctctgcaattttatcgactgtcaccgcgtcaaagccattttccaacaataggtcataggcagcagaaagaatcgccttatgtgttccttcatcacgcggccgtcctcgtttactctgcacatgaatcattccttcccgaattataaacgatacgttcagtatacttaacctgtataaaaaaagaaaacagaaacccatttacaaaactgaacgtttagtatattattcacttataaacaaaactgaacgtttagtttataaaataacttgagggaagtcttgatgaaatgcagactccaaaagcctctgcgtaaaggagatgaatcagcaaaatatttatcaaacctcataaaatcattaaaaaggagttcattcatatggctaaagaaaataaacaaacagcggatcaggggatttcaactggtttaacccttcttctcgcaacggcatgcggtatcattgtcgctaatctttattatgcacagcccttggcaggattcattagtgcggcaatcgggctttctccaagcagtgccggattgattgtcacgctgactcaaatcggatacgttgccggcctactgtttctcgtccctttgggagatattatcgaaaacagaaaacttgtcgtggtatcgctcctactaagcgcagccgctctaactctgacagcatgtgtgaagcatggaacactgtttttagccgctgcgtttttcatcggactgggatccatcgcggcccaagtgctagttccgttcgcatcataccttgcaccagatgccgcacgcggccgggttgtcggcaatgtgatgagcggcctgcttctcggtattatgctttcccgtccgatatccagtctggtcgctgatatatgggggtggaatgccatatttgctttatccgccgcgttaagtgttgtcctggcaatcgtcttatcaaaagtgcttcctgccagaaaaccaacagcaaacacaagctacaccgtcttactcggttcaatgtggaagctgctgcgcacgactccggtcttacgccgccgtgccatttatcatgcgtttgtatttggagctttcagcttattctggacgactgtacctttactattgtccggtcctgcttttcatttttctcaaaaggcaatcgcgctgtacgcattagcgggcattgcgggtgcagcggctgcaccgataggcggccgtctggctgatcgcggcttaacccggcttgccaccggaatcgctctcggtgttgtcatcgtttctttattactcccgctcatgattcagagcagctctcccgtcggaatagcagttctggtggccgcagctatcctgttggatatgggggtatctgccaatctcgtactcagtcagcgtgccattttttcgttggcacctgaattccgcagccgattaaacggattatttatggcaatcttctttctgggcggcgctataggatcatcaatcggaggatgggcatacgcctcaggcgggtggagtatcacattatggattggaatcgcttttccggtcatagcattgctttatttcaccacggagaaataagcctttcaccaaaaataagccgtcaggaccaagctgacagctttttttggggtgtattcttctttacatccatccgaacaaaacatccggattcatgaaaagatgatattgattctttacgccccgctcatatagacgggcgcatgcccgctgccgattctttcagcagcggtaaaaccatgtcataatatgtttagaaataattgtccataggcaggtgaaacacatgaagaagtatttatataaacaccttttgttagctctcgtttcgtccgtttgctttttattggtcttttatgtgggtttaaaaatgacacaggaagacacacccccgttgtcttcttacccgttttacctttttatttatctttacatagcagccggatatttgacggtcggccttgtttcagcctgtatgactgatatcttgaaaaaccgctggacattgaataaaacgtcttccattctattgaaacttatcgtttacttactcataccgtatgctatttttcattctttcttcattttaatggcgccgttgatttatgtgctgttcgagtcgttattcatcctgagaaaagcttcataatcagaaaaaaacataccgcatgctgccggtatgtttttaacatgcttgtcagttttttgcggtgattcgtttgatgttttcttccatcaagccggaaatgagctgttcgtttgtatgaggaatctgtttgagctgttgtacgaccagcccttgtcttgcggctgaatgattttgactcagctttgcctgtccctctattttgctgattttgattttaaaaccttttacccctttgttcatgcctgccagcaatttcgcatcgacatcctctaatttgtacgggctgtcggggctttcgtatttcaatacgagatcactcatcgactgcacggtttcttcctcatccaaaagctccgcctctccgtaaacatgaaccgccacataattccatgtgggaacagcctgattcgtctcataccatttaggcgagatataacaatgaggcccctgaaaaacggctaatacgttttggccatcaatctctttccattggggattcggcaatgcaaaatgaccgtataagcattcgttattcttactcatcatcaatggcaggtgggttgcatacggcatgccccccgccgttgaaaacaatgctgcgaaaccatactctttgattacatcgcacgcttcagcttcactcagctgaaatggagccggaatatacatacaaaactctcctctctgaacatggattgataaagcgctttccgctataataaaatatcaactgacatttaaaaagatacagtttcaaataaatacacatgtcagaggagaacatctgatgaaaaatttgattttcgctttcagaagcggcaccccgaaatacaaacaaatttacgagcaatttaaaacattgattgagcaaggaaatattcaggcagatgagcggctgccttccattcgcgagctggcggattccctgcgggtaagccgcaatacaacgctgatggcctatgatctgcttttagcggagggatacattcgcggagaaacacgcaaaggatattttgctaatgaaatagaaccctctttatttcaacaagaacatgatgttgtttacgctgagaaaaccgaatcaactcagccggccctgattgattttcgcgccggagccgtcgatcaaaagcattttcctctgaaaacatggagaaaattatacaatcaagttttggcatcagagaaaagctttctgtacggtgaaccgttcggcgagagaaacctgcgtgaacaaattgccgcttatctcttggaatcacgcggagtgaaaacagatgcggattcggttatcatcggcagcagcacccagcagatgctgatatatctcagccagattctgaaagaggatttttccggaattatcgttgaagaccctgggtttgacggtgccagagcggcatttcaatttcacgggctatctctggaaacgatgcctgtctatgaaaacggagctgatttttctcaattgcatgcaatgaaagaaaaattaatctatgtgaccccatcccatcacagcccttacggcgtaagcatgtccattcagcagcgccaaacactgatcaattgggtgaatcatagagagggttatattcttgaagatgattatgacagtgaattccgttatacacagcagccgtttcccgctcttgcttccattcaatcagaccgggtgatttatttagggaatttctcaaaatcctttctaccgggcatccgcataagctatatggttttgccgcagcgccttttgcaccggtataaaaaacggtttattcatttcgaaagcaccgcttcttcgcttaaccagctgaccatggctgaattgatgaaggccggtgaatggacccgccatattaagcgcatgcgcactgtctacaagcgtaagatgcagcacttgacttcacatatcaagcagcagttcggcgatcaggtgacgatcatcggcgagcagtcgggattgtatatattagtaagagttcacctgaactatacagaagaaacattaatcgaacgcgcctttcagtacggagtgaaagtataccctaccgctgtctatttcgttgccggaaagcccgaaccgccgatcataaagttaggtttcgcccatctcgatacggatcagatcacacaaggcgtacagcttttgagaaatgcttggctgtcatgaaagaaaaaaggcgccgaacggcgcctttttttatcttttatttcgtatttcttgggaatttcggcagtccaaatataatggcggcgatgccgcagattccgattaaaacgggatagaaagagtatggcaggatgctgacgggtgaaatattcccgaatttcccggctgataacagctgcgcgccgtaaggaatcaatccttgtatcatacacgaaaagatatccagaatacttgccgattttctgttgtcgatgttgaatttatcagcaatattctttgcaatcggcccggctgcgataatcgagatcgtattattggccgcagccagattcgtcacgctgaccaatccggcaatgccggcttcggcgccttttttggaacggattcgtttcgtgatgaactccagtaaaaagtcgatcccgccgttttgtttcatcacaccgaccattccgccgatcagcatggacaggatgataaggtcgctcattccggcaactccatccgtaatcgctttaaaataagaatcaaacgtcaggctcccgcccgccaatccgatgattcccgtcaaaaccaatccgccgaatatgacagccatcacattaataccgattaacgcaaaaactaacacggcgacataaggaagcaccttaatccagctgtaagatgcagcatccgtatggagggcgtggcctgccggaataaaaaataagataataacagtcacaatggcagcgggcaaaacaatcagaaagttcgttttgaatttatccctcatttgtgttttttgcgtccggactgccgcaatggtcgtatctgaaataaaagaaagattatctccgaacatagctccgccgaccacagccgcaatcggtatcgcgctggagatgccaagctctccgctcaaaccggcgctgatcggcgcaaccgccgcaatcgtgcccattgatgttcccatcgatatagaaatgaaacaagcaatgataaacagccccggcagcaaaaactgctgcggaataatgctcaaagcaagattgacagttgaatgcaccgctcccatcgcctcagccgctgaagcaaaggcacctgccaatataaaaatcataaccataatgataatatcaggatgtcccgcaccggaagcgaaccattctattttttgattgagcgatttcttccggttaaataacagcgcaaaagctgacgcaatgatcgcggcaatcaagatcggcaatttataaaaatctccggtcaccagaccagagccgacaaaaagccctacgaataagactaaaggcaataacgcccaaggattcttatgattgttcatctgggtaaaccacctcttttcagcattaaagtcgctaatcacagtctaagcaacatttcacactttaaaagtctgcagtaaaaaagtcaagctgaaaaaaggataagtaatgattgataagatagaaaaagctgttttgtttcctctctttagaaaataaaaaaaaccaaggctcgtttcccttggtacatttcatgcggcccggcgcccgggacaccttctcttcattcagaaatacattcagctttcaatctgtttttaagtttcgcttcattttccaggatatcttcgtaatcctcaatcttcctgtttaatcgttttatggtttcatcaatttccctctgtttctccgtcagccttttcctttcatttataaggatgttttttcggggttcgatcgtatgatcggctccttcaataaataaagcggtatattcaatcagcgcctcaatcgacagcccggcacttctcatgcattttataaattgaatccaattcacatcatcttcgtcataatcgcggatgccgctttcatcgcgttttaccggaggaatcagtcctatactttcataatacctaagcgtcgcggctgataactcaacctgctttgcagcctgcgcaatcttcatattcttaccacccatccttcatacctttcataagcgtgccattatagaatatcatttcataaaaaaataaaccaaaccccttgacttaaagtccgctttaacatttaaagtaaaaccgaacagaggattcatcactttatcttggaaaggaagataaccatgtgcaataatcatccgactcgtgtattaagcgctccgcatgccaaagctaaatttgagcggacgacgattgagagaagagcattacggccgcacgatatcctgattgatattaagtacagcgggatttgtcactcagacatccacagcgcattcgatgaatggggcggcggaatctttccgatggttcccgggcacgaaattgccggagttgtggaagccgtgggtgaagaagtcaccacatttgccgccggcgaccgtgtgggtgtcggctgttttgtagactcctgcggggaatgtgaatactgcctgaacggagacgaacaatattgcacaaaaggcgttgttcagacctataataacctggactacgacggaaaccctacgtacggaggctacagccagaaaatagttgtcactgacagattcgttgtccgtattcccgatcagctggatttggatgctgccagtccgctattgtgcgcgggcattaccacctattctccgctgaaacactggaatgccggtcccggcaaaaaagtggcgattgtcggaatgggcgggctcggacatttagccgttcaattcgcgcacgctttaggcgcagaggtcaccgtcctcagccgctcaatgaacaaaaaagacgaagcgcttgaatttggagccgatcattactttgcgacaagcgatccggatacatttactgagctggccggacgatttgatcttattttaaatacagtatccgcgaaccttgacgtagatgcctacttatccctgcttcgcattgacggtacattggtaaatgtgggagcgcccgctaagccggactcatacagtgtgttctccttaatcacgggccgccgcagcattgcgggttcactcgtcggcggtattccgcagactcaggagatgcttgatttcgccgccgagcacggcattgctcctaaaattgaagtgataccggccgatcaagtcgacgaagcgtacgaacgggttctccaaagcgatgtccgctaccgtttcgttattgatattgcaactttataattctcataaaaaacataccaatatctattggtatgtttttttcagcccagattattttttatttcagcagccatccgggcaccgctttgatataaaccaattcaccgatcagctcaacaatcgtctgtgtgacgataacagcagcggctaatgaggcccaagcatccggcaaagccagcgctaacggaaggactgcgagagaattccttgtgcccgtgctgaagatcaatgctcttccttcacctgtatccagacggaacgcatatgcgataaaacgggagacaaacggcataatgagcaggaatagcagatagatcggaatcacacgtataatgatgtcagcatcattgatgactttgccgatttgtgtggcgacgaccgccaataaaaccagagccataaaaggaacaggcagccacgccgtccattccaacaccttttctcccgccggtttcttatcagcccataattgagtcatcaccgccgccagcagcggcaccgctattaacaataagaatgcttccagaaacggtcccgcatgaacagctcctatcacttctttcccgataaacagccacaggtataacggaagcaataccatctgaacggcgaacaaaaccggcgtggaagccagtattaatctctcatttcctttgccgagctgagtaaagacgatgacgtaatcaatacaaggtgtaagcaataccaaacaaacccctgataatataggaggagattgaggaaaaatggcggttaacacccatacaacgacaggtacagctaagaaattaccgatcagtaaggccgccataaacttgaggtttgacatggcttccctcagcttcaagaatgggatttgggcaaacatggcatacatgagaacagcgataaacagtgatatcgtccatccccagcgaagtcctgaatctttcccggcgatccccgctattcctccgatcacaagagtcacaccatatatccaaatttgctgtttttctaatgtctctctggttattttcattggctgacacctcttccccgcccattataccttcttttctgccggaattaaaaaacaccaagggtctgtgacacttggtgttttcaggacgtgttattgttgtcaaaaccgcttacgaaagcttatttgtgttctctgtcctgccaacgaataaggtgaccgcaacactcgctgaactgaccaaagtccccagaacggcagcaagaattgtcaaaaagccattgggaatcagaaatccaatcggaatgaggcccgcaaacgtgagaacgataaaacattgatagactccggatatgattctcacaaccaagctgctaaaaaaggacatgacgaatggcggaatgaacaaacataaaatgattccgagtgagatcaataaaatcataggctcgtcaaaagaaatgacacgattgccgggagactcttcagccgccgcgaatacagcaaatatagacatcatcagcgtaagaaaaacaagaaaaaaccttttcagcaacgttatgactccttttttataaaaacgggtatctttttttcaatcacaataaccattttatgttatcaaatgaaataatatgaagtcaaaccgagttctgcacctgatttatcggttcttatttttttgataatttccatataattgtccgcaagcagcatctatatcaatgccaaattgacttctgacggtcacgttaattcctgctgactttaattttttatagaagtttacaacttgtttctcatttacttcttcaaatctcataggtgaactaacagtcgggttatatctaatgatgtttacatggaacaagttccctctcttatatctgcttcttaaaagacgtactacttcattcgcatgatcaatagaatcattaactcccggcagcataatataagcaatataaacttttcttgaggtcacacgtatatgctcatctaatgtgtccattacctccaataacgggaagcgttcatttatcggcattaacttgcttcgctgttcattaaaaggagaatgtaatgaaaacgtcaggttgacctgcggataatcctgagtgatttttttaatgcccggaataatacctatggtcgaaatagataaccgacgagggcttaaagcaaacaactccggatttgtaagcacatgtaaagcatcaaaaacttgtacattcgctaatgcttctcccattcccataaaagaaatactatcaattgaatgtccttttaagtgaaagtacaaaatttggtcagtcatttcatctgatgttaagctgcgttttaaaccaatatctcctgttgcacaaaatgcacagccaaaatgacagccgcactgcgaggatatacaaaatgactcccagccagctttatatttcatattgaccgtttctattttttcgtctcctgaaatttcaaataagacttttgttacttgctcagaatgctgcacttttaaagcagcaatatttaaaattgactctccaaactcattcattaacaattttctcaaggatttaggaagaaccgttatttcattaaaatgatttattctccctttgaacacagcatttttgatttgattcattctaaaatcaggaaacttattttgtttcaggaactcttgaattcttatatacttgtttttttgttgcatgttttctcatccttccataaaactctggtttgtttgagtaaatagaagggagtgatcatctaacctttttttaaaatcaggcacaaaaaaacaccgacacaattatcggtgttacgcttaaataacatcatgcacaaataaacaaggacattatgtcattggattatcgtttatttgacatagagaaaaagcaccgataactgtttttgtatgatgatttggcttaaaaaaggacagactgctccctttatccgccaagatgtttccaatttttgcattttcaccatacaaaattccataaatcgttatcatcgctttcacctctttcttgtcaatattaacaataatcaccatatcataagggttcccttatgtaaagttaaacaaatgcttacgcccccgctaatgacagtattataaaacttgcttattaagcctaatccaagtacagaaagcgcgctgatcacatgtttcacttatccgcgacggaacatttcttatataatgggtgaccggcagctgcctgcttgaatcccaatcttcttatagtgattttttatattcatgacagtatgatgatttgtcacttcagcaatcagatcgtttattcgatccagattaatcggtttattttctgataagctgctgaagctttctctgatttcttcaggatagacatttccggccatgcttgacaggccgttacacccgttactcagcatcttcggaaattcaacgtctcctgccgcaaacaaaataaagtgatcagggaactctgtttgtttatgacgcagaacgtctcctccttctttcagcccccttatcccgggatgccggcttattaagtctttaagcgctttctcactcagattaaaaccggtccggccggggttattataaagcacagcctctttagaggtatgactgagaagttcgtcaacgtaataaacggcttgctgctgtgtcggtcttatataaggaggaaaaccaatcagtacagaatcaatattggttttctcgatgtgtttcatcagtttgacggcatcactggttcttacggctgaaacaccgaacatcagttcaacatcttcaaattttcgctgattaacatactcaatgatctgaagacgctcatctatgctgagtgaatgctgttcaccagtcgtgccgcatatgagtaacgaatggataccgctgtttttcaaatgttcgacaatagcatcaaatccttctaaatataaactttcatcttcatgaaaaggcgtagggatagcaacattaaaatttcgcatgagaatgtcctccaagtacatattcttgaatatctgcagagtatcatataacactgtctgacatttaaaaaggtacagtttcagataacgcaacatgtcagatgtaaagccgacacacaaaaaaagcaggcaaagagagcctgcttcatagcttcgtcttacagcggcccattccccggatggcttgacaaatatgagtaataaggcaaactgatataaaaattgtgctaatgaggtggggttaatgattttagatttaaaaggtgaaacgcacatggatcatcttgtgggaacgctgtattctgccgttaatgaaaatgacagccgcttaatatccattgtgtcagacatgtcacagcaggagattgattataaaggaccaaatcatcaaccattcaatggggaatatggcatatggcagaccataatagatatcatcaagctcatattcatcagcttcgcaaatggtatgaagagaaacagaaacttggcagttaaagccgcttattaggaggagcaacgataaattcattacaaatgtctattttcactgactgccaatcaattaaaatggtcagacaaaaatcgctattacatttgcaacgtatcttaatccggccggcgcagttgtaataaaaaaagaccgctttcccctcttcttcaacgtaactgacatcatcatcttcatttttcttaacataaggttcagcaaatcgttcctcggtatattccacacattgctttcaaatgcaggtgcaattctccttgaaacagcaaatggttgtttggtttattgaattctttcatattaaaaaatggagtcattttaatgatcatatcagtctccttccaaacgagattgcatttacccattatttgttattctgcaactgaatcattatcttttatatcaggaattcttacaaaaaagtaaggtaagtgtaaggtattcgcatttattcgatatgcagtgttcattagaataagaaatataaaaggagtgatgaagaatgaaaaacatgagcattttcattattatattaggctgcctatcggttttcatattaggaggctgcgctgatcaaggcgccgtgctggaaagcgattattacgtacaaattcacggaaaagcggaaaaaaacaaaaataatagcaactacgtttacaatttagaagggtataacgagaaaggtaagaaaaagatggtttctttctttgttgaaaagccttatcaagaaggtgacattgtacgcgttccgaggagctatgagggttataccggagaatctgaagctattaaggccgagaaactgcctgaaaagatcaaagaccgattcaacattgagaaataacagcgagttgagcagatatttaagtctgctctcaattttttacgacaggttcattcgaatgcaaaatgcaggatggctccttgggccacttctacataaaagattgtgcaaattaagcacaccctccccattttctttttttggctggttacaactatcggaagtggcattgacaattcttctatggtcccaagtaattaatgaactctatagtgggcggatacgtatacggcggggtttgcagttttttaacttcttgttatttgagctatttcgacttttacttgaaagaattaaattagagagtctgaacgaggagtgaagcacgcgctccatgtgaatccatttagttcaaactgaatatgcgcggactaaaatagttgcactgatggacgtattcaacacaaaaaagagcagtaaacacgtaagttactgctctcctcagtctatccgccgttcatttgttttacaatgtattcagcatcatttcctacaccttgaagcagcgctgaacctcgcctatgctgccaaggcaaaccaataaagtacaatccctccgcagctgaaacaccccggtgatgtataattcggccttccttatccaaaacaccttctattttcatccaccaaagcggattcttaaaaccagttgcccaaataacattgtttacttctaatgaagatgaatctttaaaaatgacttcattttgctttccggctatgactctttgttttaagatgatcttcttctgtcttattgcatgttttaattcatacccaaatatgaggtcgcctttcttttgaatgaacttgcctaatattgatgtatgacttgcatgtaaaactcctaatttatcaaaccaccaaaagatgcttctttttccaatccataaagggaaataaaccggttttttactgcaagccaaatatgtaactctttctttggataactcaacagctatctgagccccgctattcccgccgccgactaccagtacattcccaggcgccagttgttttgaatgtttatattgtgaagaatgtaattgacgaatatgaccggctacatcctttgatattgatggaatgttaggggtatgaaaaggacctgcggccaccaccagattcttcgtttgatattcttcccggtttgttttaattaagaaatagttgtttaatttttggacacttattacttctgtccgtaattggatcgggatttcaaatctttcaacatattttttcagataagcagcaatttcattttttgaagggagtccatgcttgtctccttcaagctgcattcccggcaaagagctgtacattcgagaagtaaataagaccaatgagtcataccggtttttccagctttcccccacttcatgacttttatctaaaatgataaacttttgtttcgacttccttagataatatcctactgagattcctgcctgaccggctccgattactatcgtgtcgtacatatgaatccccctccggttttatcttaattgtcagcagacaaagttagtccctatctcctcctttaatgatgatgatggtcacgcggattctcagtttgggcctgacaaagaatcgtattgtcgtgattatgcgctgccgtttccatttgaatggttacatgtgtaatgccttgatctccaagttcatgttcaattttgcgtaaaatactttcactttcagaaatggtcagctgatcgttaacaacagcgtggcaggaaagagcattcaatccgcttgtgatagaccatatgtgcaaatcatgaatgctttgaattccttctgtctcttcaattgtatgaatgatgtcagtgacatcgatattttccggagttccttccattaatacgtgaatggagtctttcgtcacatggtaaccgcttctcagcacaagaatagccacaatgacactggccactggatctgcccagctccacccgaagaagatgataaggatcgcagccagtatggcacctacagatccgagcatgtcacttatcacatgtaagtaagctcctctaatgttcaggttattctttgtatctccgccgttcagcataatccaagcgaccaatatattcacagctaacccgatgatacttatcgtcagcatgccggttgttgctatctccggcggatgagagaaacgtttgattgcttcataaatgatataaagggaaatcagtattaatgcaacaccgttgatcacagctgcaagaatttcaaatcgtttgtagccgaatgtcttatgatgacttgcctttttttcggccaatttaaaagcaatcagagcaaccattaatgagattgaatcactcagcatatggcctgcatctgacaaaagcgctaaactattggttaaaaatccgcctatcgcttctattatcatataacctgtaatcatgataaaagagatcaataaaaccttcttattggatccgccagcgtgattgtgattgtgacccataaaaatctcctccttatctaatacactgtatttattatttcttttctgctatgaagcattctaacacggacacaaaaataaccttatatgattatgtgctcatatatgaatatataggttctttactgaaatgtcaaaatattttcaatgaaaatgtttcttatcattagcttagcttgggaggttgcattgctatgaagccgcggattacagtaattactttaggcgcagataatttagaaaaatcgctgcacttctatcgggatggcttgggtctgcctacagaatacagaaggaacagccggtacagatttggacgacttgcaaacgggactgaaacttgccctctgggaccgcaaagacatcgcacatgaatcaaacgttacgataactgctcccgctcatgatactttttggggcggatacgccggtcacttccaagattccgacgggcacttgtgggaaattgtttggaatccgcactgggaatataagtgaataaccaacttttatagcaacaataaaaacacacctgaatgttctggtgtgttttttattttgtttcccacaacgatcaaactatttatacgatggcgggatgctttgcggaaaacggaatacattttcgggatcgtatttcgcctttattctttgaagccttgcaaagtttgagccgtaatatgcttttccgaagttctcgatattttgatccggaacattcacataagaacctgttacatatggtttcatcagctgacgcactctttcaactgatgcaagattcgaagcttcttgtgatttatttttccaactggccgtccattccgtataaaataacggacggcgccaatagaaggctgtttcactgcttggaactctgcttatcgcaccgccccaattgataaaaaagaaattggtttctgtcccagtcgctttttctaaaaattgtctcattactgcaataggttcttccggccaaagattgagcgcccacgccgaggagaatttaacactctgatcagacctgccgggaatcggttcatcaggatctaagaaatctatacaatccggatagtatagtgttttgattactgtttgtgccggcgttccggcatttaataaaggttttaataattgaatcagctccggttttgacccgaggaacaatccttccgcatggcacaaaccatttactttgctgtaaatctcaaggtagcatcctaatcgttcgtctgtaaacggtgcccatttttgccatgctttgaataccgtttctaactgttcccacggccaaataatattaaagacggttgcggttttaggggcacggtgaactttgaacgtatattgggtgttatatccgaaattgcctcctccgccgcctctggaagcccacagtaaatcttcattgcgggaatgatttgcttgaatgatcctgcctttggcatctaccattttcagtgcgagaaggttatcacttatcaggccgatcgatcgtgaaagcactccaaatccgcctcccatcgtgattcctccgattccgacggttggactgtctccgaacggggccataaaaccttcccgagctaaaccttttacaagcgggccgacgtgaatgccggtttgaacggttgccaccgcgtttttttcatctaagaaaacgttattcatgtcactcacatcaataacaatcccatcacttaccgtggaaagatttttatccagagcatggcggccgcttctgacacgcaaaggcacattcttctcacgagcccatttaatagcattacttacatcgtatgaattttgcgcaaaaacaaagacaagcggacagacatcaacataagggttccaattcttaaccgcctctgtatagccggggtcccctttgaagatgacacgtcccgttaactgtgctgatcccatctatttcactcccaataagcatttgattcccataccagtatatgtaggaattggacaaattcttagacagatgttctgcaaacttaaaaatagatacatatacgcgaagatgagaaaaaacaaaaaaaagacaagtgcggcaacctgccgaaactcttgtctctcctgccatgataggcacttacatttattggcgtgatatcccgaccaaactatggaagtccatagaacattatgtttgccctgccatgcgtggttctgctgagcaatctttctgtttgatcccccgacaagaatctttttctttatcgtttttgcacccctgtacggataaaatcaatacacattgaatcttatcttttacatgatgaaaagctcttattttttcttcttgtgcttacgtttgcaatcatgttttttctctttcttatgacgttttttacatttcgcttttgctttggctgctaattttgccgcttctacctttgcttcagctgctgcttttgctgcttctgccgctctggctcttgcttcttccgctcttgctatggcttcttccgctctggctctcgcttctgcttctcttgccgcttccgctcttgcatcgtcgtccgccatatcaaaatcatggccaaggtcacaggcctcgttgtatggctttttcttctggaagtactgttgatcgtcaccatcgttataatacattacgccactccttctctcattttttaatctctacatactatgtaaagaaagatctgcagcttggactggtattttgatgaaccggcacatttttagggcaattttcatttatcattgcaacagaatctggatgcctgcatgaaacttgaatgattttgacgattatcttaagcagcgtaaaaagggagactacgaaaaaaccaaggggttaaacccttggtttttttgtaaaaatgataaaaaggatgctgcacgctgcagcatccttctgtaccaactttttattgaacgattggaaagtattttttagcttttagtttgcttgctgtgtttgttttactggttctttgctaaaaagtccgacaatgttccacaagataatagcagcagctatgattacacgagccgtactgacttcttgattagtaaacaatttatagccatatattgatcccaatgctgctatgcaaaaaatattgaaccatttactccaacgcaattagaaaactccttataaaagattacatttccaaacaatatattataatattaacaaattttttcaatatttaaccttaaattattcttaagtggttttcctgatcattttctctaatcgtcattcgatctttcggagttttgatcgtttttttgttacaggctagacccagacatcattttcagctgtttgatcagttatttcctgcccggtattgacaacacctttaggttctgcaagcaaaatgttacactctgattctgcataaggtttatgttcaacatttttcggaatgacaaacatttcaccttcatttaattttacttttccatcacgaaattcaatgattaaattacccttaataacaataaagacttcatctgtttcgtcatgcttatgccaaacaaaatccccttgtactttaacaagtttaaaattgataatcattcatttcagcgattacttttggagaccattgatcttggaatgcagataatttctcttggaaattaatcggtttatattccattctttccccttcccgtgtaaaactcaatcatttaactagtcccaaattaaaggcctgtcaacctcagcagttctgaggtagtctaaaagctgaccggtatgtacagactcatggtaagcgattcttaataacatgtctcccagttcgcgaatatatccaacatcagacctgtcaatctttatatttgttaaatctgtttcgtttaacgatttgatgaatgtcaaaaacgcggcccgatacggttttgcaaattctaattcttcgcttactgtggtaaacgtttttgattcataaggattaatagtttcctctgaaaactcactcatatttttcattaaaatttgatgataaagaaattccgcttctaatacatgtcttatcatttccttgcacgacatggcttcggagtccgggcgccagtccattttttcctcaggtacagctgtccataacttgatgcttcgccgtcttacctcttcaaaatgtaaaacaataaggtcaattgtattcaagtattttcccccttttatttttaaataataattctccttcttcccggaaaaaacctcttcaaataaaaaacatatcctttcccgactcgccggattgataatcaaactatttttaagataaggagatattcattcatccatacaatagactctggctgaacatatactgaatgatagttttcatcagaaaggagaaatcagctttggcaaaatatcggatcatgacctttgacgggggcggtaccttaggtgctttaagtttacaactattgaacagactggctgaagaaaatccggcattaataagccgaacccatgtatttgcgggaaattcaatcggttcatttactgccctggcattagcaagcggaagatctccgaaggaaacacttcagtattttgaggatgaaatcctgcccgcattcagcacttcccggccgggcggacctgtttttaatcagcaattaccctattccggttttattaaagcggtacgaaactttttcccgccaggccttcgtcttaaagatgtaagaaaacgaattgttgtcccttcattcaaattatactccccggcactggatcgttggacgcccgtattatttcacaactttcccggctctccctatttaaatgagaaagtgagtgatgtcatactgcggagcagcggtgctcccgcgacacagcgcgcctatcaaaactacgtggacggatatgtagtggcaacgaaccccagtacggccagtatcgcgtttgcggttggtaaagccaacgtgccattggatcaaattgcggcgctatccatcggtacaggtgaagccccgactcggttaagaagagatacgaggggatggggaatggtaagtgcggataacatacgtcccgaaaatctgaagaaccttcctccaaattggggagtccttttggacaggtcgcctaatgaacctttactgccatttcttcagatgatctccggcggaaatggctactatgaatccatggtcagcgcgaatctgctgggagatcgctttttccggttagatccgcggattcctaacttctccaaaacagacccttccgtggttcccgctgtcattgaaattgcaaacaaaaccaacttacagcctgcgaatacatttatagagaaaaactggaacgacagcgctaaataagcaagaagtttacatcatcatacaatgaacaaaaaataccaagggactcaaacccttggtatttttaatgcgttcaatcgggccatttattgaatagaactgccccagaagtcgcttcccattacgtaaagaaagcgacttttagatttgattttcaagttccttttacaaattttgaaaaggccattgactattcagttgtactgtattaagtttaactatatagtcgaactgaatagaggatgaggatatgaaacataaattattaccgctgtctgaaaccatgcattatattttattagctctgcgtgagccgcttcatggctatgccgccatgcagaagatagaaaagatgagtaacggaactgttattttagcagccggcacattatacggcgcgattgaaaatttgaataagcatggctggattgagcctgttggagaatcaggccggagaaaggtttatatgataactgcggaaggaagcgccattttgaagatggaacaaaacaggttactgcatattttatccctgcacgaaggaagtgaatcgaatgaagaaatttaagatgttttttgatattgaaaaagaggagcaatggctgaacgagcaactacaaaaaggctatcgctgtacaaatatcagcggattaggaatatacactttcgaaaaaaccgacaaaaaatatgtgatgagactggattatcaagattgtttatcaaagaaaaaatttaaagagtacaaagaaatctatgaagacttcggctgggtttatataaacagcccatggcttagcggaactcggtattggcaaaaagaaaatgatgatcaaaatgaaatcttttcggatcgccaatcaaagagtaattattataaaagactaatggggttttcatcttgttttggtttactgtgcttgttttattcttatttgatttacaaggattcgggtttatatttaactgaaggtctgtggagtatggaaagcgcaatgttttggaaagcatttttatttgaaactccatttgccctgttgaggtcgcttcccgcccttatggctgttctatttggctgcagtttctataaaacgtatcgaaagtattcaatgttaaaagaacaataacacggggaagttacattcaaagaagtaattgaggatcatgcatctgccgaagccgggcgctttaaaggaaaaaaagcgccctgaatttgctgataaatcagatgacttattttgttaatgatacatacttatttacaatggcttgagcgagacaggctgatgaatcaacaatagtaagtccgcttcttttttggtccgtgaccatatttaaatccgtacatgcaatgataaccgtatcagccttttctgctaagtcatggtgtaattcatcatataatgtaccagcctcatcgatttgaccttgtttaattttttctattatttgatcgacatagatttgccaactatcttgatgtaaaaaatcataaccttctctgtttaacgcttcttgaaatattccggattgaaccgtaggaacggtggctaaaagagctgctttttttgagcctttaggtattttttttatggtttcatcaatcatgttcagtaaagggactgaaatcgatttttttatttgattaaaatagagatgtgcggtattacatgggatggcaataaaatcaacacccgttttttcaagctttacagcacccttaataattgcattttccatgtccgtatgattgagaggtttattcatgtagaaaggtgtcggacaggaataaatcatcatatgtggaaaatccgtgtcatgtattgctccatatattttttggcactcgtctacgactttatctacaaatggcccagtagattttggccccattcctgccagtattccaatcataattgtcctcctctgtaaaaatgtgtacgaatacgatcacgatgagttattcttgtgtttctcatctgaatctgctctcatttcttttctggctttcttctcctattttatcatttcattaattgaaaaagggctttaaaaaagatagctggcaaaccagacgacttgctttaagtaacggcgcagccgcaaacaaaaaataccaaaaacctcagaacccttggtatcattgtgatgcggctgagaggacttgaacctcaatgggttattcacccgctgggccatcaataaagtgaaactgtgttttctattacaaaacctttatatattagtgtgtgtttatattgatcatgttattttacaaagattaattcatattgtggagtaaaaatggagtcgtttttttcatcaccagaaagttacatgacatgtcttgggtgccatgtttgttaaaatcaccatcttcgttttaaaacgtacaggtttatagtgttccaaaacgctgtcctaaatgcaaaaaaatactggacgcaactaagtcaaatgtttttcacggtactatagtcaagacttgcccaagtcaccattatcaaaaagaattaataagaaaccaacgggtgatgaatcttttaatctttcattttacccgctgactcatatcaaaggagctttaaccaaattttaatagctgtcgcacttattaatagcgctaaaatccattgcaggaattttgtatttgctttttgcccaacagatgcgccaataggagaagcaatcaaactggcaatcataagaaccagagccggtgtaaaaagaacctggcccgtgattacttttccaactgttgcgccaatagatgaaagaaatgtaatcgcaagagatgaagcgactgtgattctaacagggatatttaaaatcgataacataatgggaaccaggataaaggcgccgccagctcctaaaatacctgatacgccgccaatgagaaacgctagggacgaagccaaccatttattagatatcacttcttcgtcttcgctatgttcttgtccttttttaggtataaacattaaaataactgctagtatagccagaattccgtatataaagttaattcctttttcagatatataatgagaaaagtaactccccaatacactccctaaaaggatgctgcttcccatgtacataattaatgctttatttaaaaaaccacttttacgataagcccaaacacccccaagtgtcgcaaagaaaacttgaatagcccctatccctgaaacttcatgggcagttaatgacatcactcccactaaagaaggaatgtataatagcattggataattaataactgatccgccaatacccatcattccggaaataaaggcaccaataaaccctataatgaaaagagttgtgataaaagcaatatccattttggttcctcctttcaaagaaaaagggcatctttgtattcgataccctttcacattcattagctttttttaatccagaattttaatacatcgccttcatcagtttgctctaaaagatcatgcccgcctgatttagaccaagctgcaagatcatttttagctcccttatctgttgcatgcacttctaatatttgacctgattccagttcattcatcgctttctttgttctgacgattggcattgggcatgccagaccttttgcgtctaatactttatctgatttcatgttcatctctcctctttttaatagaaacttgagttaccgtattgcacagcggtttggaccaatctccatttcacgctgtttttcttcatctgggctgattttccccatgtttgtttctcgaatctcttggtatgcatttggctgcggaggcaaatgatctgttactaagtgtctgaattctgtttcatccgcaatgttcaaaccatggttctcgctaaataatgtacttagttttttaccaacacttccatccttatttagctcgtcaatgatcataaagtgtgccggtaatacaattaaatcctgtgacaacgctttgtaacggctataaagcgttgttcttaaatctcctgcccaatcttctgccataccggctaagtctggtctgccaattgaatcaataaacaagatatcacctgaaagaagatactgatcatcgacaatgaaagaagtggaaccaatcgtgtgccccggagaataaatcggttgaattttaatctttgtatttccgatggtcatgtcgtttccttcttccaacggctgataatcgaataccgcttcttcagcatctttaggcggtaaccagtaggctgcttttgttttttcagcaatgactctgccgcctgaaatatggtccgcgtgaagatgtgtatcaaatacgtgagtaatcgtcgcactcttctccttcgcaaaatccataaagaaatctaccatacgcgtcgcatcaataatcgccgcttcaccattggaaatgaccatgtatgataggcagcctttaccgattcgaacaaactgatacatctcaccgccatcttttaaatccccgacttttaccggctctaaatgttcgctccatgctttcattccgcccttaagataggatacagaatgacctgcttcagaaagcatttcggataccatgacagatgaaccttcttttgcacaaacgaccagcacatctttatcagaaggaattttctccaagatatcttctacgccatctaaaagatcgaaatacggtacatttaaatggttaaaatcatgtccttcaatcttccaatcgctaaagtcattttcattacgtacatccaaaataaataaaggttctttgtgaaagattttttgtgtgacttcttttgcggtaagtgcttgcacggtcatgtttacatacctcctttttctgttttacctgtccagtcccgcataccgggaataacattaataacctttttaaaaccttgttttttcatggtgtgagctgccatttcacttcttcttcctgaatggcaaataatataaatttcatcatttttgtttaattcgttaaagcgcttttccacttcgccaagagggatatgcaccgctccggggatatgagcttcttcatactcctctatctctcgtacatctaaaatgtgaagagactcatcacgatccactttctgtgtgaaagcttctaatgaaatctcaggaattgaagatgcattttctgatgaatgctctcctccttttcgaagaaagtgacgaaggacttctccctctgtttcagtacctagatattcatggcctgagctttttgcccatgcttgcagatctgccgccgatcctttatctgttgcttgaatttctaataggtcaccagcttttaattcttttattttcttctttgtttttacgataggcattgggcatgacaaacctttagcgtctaatacaatatttgctttcacggtttttttcctccttttcttatataggggcggggtatataaatatgcaaaaagttattccctggatgttaataccatgtattcataccgccttttatatttgtgatgtttttaaacccttgtttcttcaatattttacttgcctttacacttctcattccgctttgacagatcacaaagacgtctttgtctttcgaaagttgatgagtttgacgaggcaagatagacaaaggaatatttttgaatcctttaatatgccttgtacggaactcataagaagttcgcacatctataaactgtttgtctttgttttccgcctccgattttaaatcagcagttgttatttgtttaacaccatgcaatgggaaaaaacgtcgaaatacgatccaaagtattgaacattactccgctattcatagtgttatatcccccttcacttattcaattgcaatggatcacattagataaataagttgacattgccttcctcagcgtctgccaaataagcagctacaccagcatagtcgatatcatctaatagttctttttcctgtaaaccaagaagatccattgtcatcgtacaagctacgagctttacaccttgttcttgagccatctcaatcaactgaggcaacgtaagtgcattatgctttttcatcacatttttaatcattttagggcccatacctgcaaagttcattttagataaacccatcttatcggcaccgcgaggcatcatctttccaaacattttttcaagaaatccttttttcactggaatcagctcttctttacgtaaagcgtttaatccccaaaaagtatggaagatcgtcacttcatgatcgtaggcagcagcaccatttgcaataatataggctgccattgctttatcatattccccgctaaataaaacaattgttgtgcgttttgtttgttttgtcatgtttattctcctgaccaatcactattacccctggggtatattgaaattaaaaattttttcgaaagatctcctattattcaattcaacatattaaataccggtaggggtatattataatgaatataaaaattcgtcaaccttaaagatgataggttgatgaatttttttatcggctctttaccaataagtcgaccgcttcttttactaagtgttgtgtgtcttctcccttttctaaactttcacgaacacaatgttcaaggtttgtgctcacaatcaaacccattgctcgatcgatcgcattacgtgaagcagctaattgggtcacaacctctctgcaatcttttccttgttccatcatggtcaatacaccttttatctgtccttctatccggcgtaagcgatttttaatcttttgatcatattccatgcgttgaactccttctttgaaatttatatatttgcatgttatccactatcatttcatactgcgctttatcacactacattattaactagataatgtttgtgaatcaatattatacccttacaggtatactgtcaattttcaagacggcatgagaatgattttaaagagttaatattagtatcccctgtttaatcacaagaaggcgctgaagttgtacgtgatttaatgcgtatgaagaaagagaaagcacttaattcaagcgaaaaaaatgttggataatgcatatgaatttttgattagtgaactggaagtcattaaaggaatcactgaaaaacaaataaaaagtttctgttaaggttaatgacagataagtttttcagagtattacgatcagacgttcaacttcttcaacttactttttaaacattaaccgcttttattactcctcaatctaatctgttatatttttttcttcaacgaacacttgaattctcgatgaaatagtcacttgatttttgtaatcctgattcaccctggcacggacaaggagccgtaacgatggaagagaggcagggctttcattgttttaggtctaagtgattatttccggaagaaaaaacaaccactctcccctttatctttcagaatttcttacatctcttgcgacagtgaatagcagttgtttatcttatttcataaaaaagatatgcgaattgtaacaaagaataacataccgttaccttgagaacataaaaacaaatcatttatatattccacatatcgtcaatccggtatgttatactgtaaacaatcctttgaggttttaaacctttttcttaccttgtagcatctgtccctactcgaacggtgagtagggttttttattcagtatgatacagagaacataaaaaaacaggccctatataaagagcctgtttgtataaacgattgaagattaagcagttttttgaacgttagcagcttgagctccacgagcaccttgctcaacgtcaaacgttactttttgaccttcgtctaaagatttgaatccgtcactttggattgcagaaaagtgtacgaatacatcgtctccattttcacgttcgataaatccaaaacctttttctgcattaaaccatttaactgtaccttgttccatttttgttgcctcctagtgtattacacattgtattactatccttgcccaaagtatcatcaagacgaaaagtcgatattcatactatcctttacacgaacaaaaataattctcctttatcatagcacgaaacggaaataactgcaaattaatatcatgtttcattcagggttttatttgttaaacgtgcggcaggtttttttgcgagaaccttcatttggaaattagaagttttgacggaccccttaccgtactaaataataaatatcatgttgagaggtgtatttttaaaaagcccactcacgaaaacgagtgggtttacaaaagctctaactaacccgcaaaggttttagtcagagctatttattttttgatccaactcactaagcgcctactctgtcatcagctcgataatattcattggaacgtgataaatcccctttttcataaaaataatcagctactctgattgcaaagttttcaatgtctccgtacattcttaggaggaagataccattagcgatgacgctaatggcgccctttgtttctactcagtaacttattcagcttctcccacaactgtaaagcgttcatttatatgttttggattttctatttcatccaatactgcaattgcatagtctgcatagctgatataactttcgcctttcgagttcacaagaagatgatcttttcctgactgataaaacccagttcttttcccgtctgggtcaaataccgctgaaggactgataaatgtccagtttatatcagaagtttcctttagctcttgcaagttacgaccttgccctttagctgttggaataaaaatctccgggaaatcaggtgtatccattacactgacagttttattttcgtctacataaagactccctgctccgcctacaattactgctcttgtacctattccttttaatgccctaattaatgcccggccagcatctacatgtgcctgttcttctcctaatggagctccgaaggcattaactattacatctaacttttttagatcatccgatgtaagatcaattatatttttttcaatgattgaaaccttttcctctttaagttttgcagcatctcttacaattgcagttacctcatggcccctgcttaccgcttctttcaagataagacttccagcttttccggttgcaccaatgattccaattttcaatttaaagtcctcctaatcattcaaaattttaaatgtaaccaaattgattacatgtaataattttagttacaccttatttgtttgtcaatacttttatcaccttgttaattgagcatattagagtgaaataaacttgtaatacattcagttacaagtgtactataaagagtgtaaagtaattaggatggtgaagaaatcatgtctattagcagccgttttgctgtaggaattcatatattggctcttattgaaataaatgaagacggaattagcacttctgaatttttagctggaagtgtaaatacaaatcccgccttaataagaaaaattatggggatgctgaaaaaagcaggtttagtaaatgtacggccaggtattgcaggagctgaattagcgaaggatttaactgaaatcaccttacttgatgtttatagagcagttaatgttgttcaagataaagaattgtttagtatacatgaaaatcccaatcctcaatgtcctgtaggccggaacatacaaagtacaattggtccaatatttgaaatcgcccaatctgccttggaaaaagctcttggacatataacaattgaggatgtggtaaaggatattatcgaaaaagaaaaaacggccgataattgttaaatgattcacagaaaatcttttatcagactggggataagaaaaatcaataaaacaaaaagggactggatcatattgaatccagccccgaattgatattgattttagatttagattacggtaagggatataaaaatgctcatgataaagagaaaaaattaacgacaatgcacacgatgccagattctttaatagggcgtgagtattactatccaacaactcaaggttcagaagctaagttcaaacaaagacttgaggaaatctcggattggtataaaagaaaccgcaaatcttagtttgaacgaatatgttctgtatataaaaataatgaggtatggagtgaattgataatgaattatgatgaaataaaagattactgcctaacctttccaaactcttatgaagaccacccttttggagatggttggactgcaattcggcacaaagggaataagaaaatatttgcacttatcttcactcgcgacgaacacttatgtgtcaaccttaaatgcgaacctgaaagggctgattttctgcgtggtctttttgaagaaatcaagcccggataccatatgaacaaggagcattggaatacgcttaccttagatgagggactcccagagcatcaaatccatgacatggtaaagtacagctttgaactgacaaaaccaaaaagtaaaaaggaaacataacatcgaaggatagaacgctcattatagatattcatccggtgcaatgatacagaggaatatgcaaaaaacctcaaggtagcaatttttaaattcgtatttacgagatgattttttcgttattgtgagtcctttgtttctcgacataggttgaacaaataaaaaaagagcagactcaaaatccactcaattaattaagatgattgctcatttcatccagacacctataaaaaatgaaaggtgacgatgatatgccgcaaaggtcatttagcgtttaattaatactgataactcaccttcaaacactttttcctctttctgattataggtagataacaatacagtaagtatccccgtctggcttttatttggttttttatcaataaccttaacaatagtgttcagtttatcattagggtaaacgggtgctaggaattttatattattcattcctgtcccagcaataatatcgtcttcatgacacccttcttcaatccaaagcttaaaagtaatagataacgtttgtattccagaagcaataattccattaaacctgcccatttttgctttttcttcatttaaatgcatgtactgtggatcatacacttctgcaaaattcattatattctcttttgttaattcaaaagatttagtttgaaaaacctgcccgatggtaaattcatccaacttcataaataaatctccttgaatctaaactttattattaaatctacgtagcattttaacatactggctctcacacaacaacttaacggtaaaacaattgttcccctatcaggaatgaacaagcacattgtttttgtttccttgcctttaacctctttataatcaggtgttttcttataaagaccaaggcggtcgccatcaccatcacccggcatatgtgccatttcctcataagaatctccaagcttctcataataagaataagcagtcagcctacgagaactttcttctggctgataaaacgctgaatatacttgccgtcatcatatacagaaattatggcgttatctcttttgtactcatctgaatctgctcgcatttcttttctgactttcttctcctgcttcatcacttcattaattgcattatcatatttactaccgccgcacgcagtcagcagaaggatgaaggtgactgacaaatcatacgacctactataagtaagtggacagtaacagatgaatttttataaacaaaaaataccaagggtgtcaaaacccttggtatcatagggatcggccgagaggacttgaacctccgcaggttattcacccgcttggcccgccatctatattcataaaactattgctcagttgtcagcatgtgaagtaaattacgaatttccttgttataacttttaatttcttcttcattacaaccggttttatcaaatactgcattaggtatcattgtgactttttctttaaactcattcccttcagttgttaacgtaataattacacttcgttcatcctcttttgaacgctctcttataataagacctcgctcctcaagtcgttttaaaactggagttaatgttccggagtccagatataattcttcgcctaaacctttaacagatattttttccttctcccataaaacaagaagaaccaagtactgtggatacgtaattcctaattcttttaagagaggatggtataactttatcatttcacgggaagctgcataaatcgcaaaacatagatgattacttaacagtaatttatcattcttcatgttaaattcctcacaatatttatattcattactacacataatagcataagaattacattaagggaaattgaatgactgacaatttaattaaccataacttatatacatggaaactttatttataaccaaaatgtgtttgaggtgcattcttattatgaccgatatagatacttccactatattgtttagaccgactcatagatttattgagccaccttctcaatatggttattatgtacactaactttaaactgcggaaaactgttctttattttagtctaatcattcatttagagaattttaattgcgaatttaaattgagagcaatttaatttcaaaaaatttaattgacaacgctgattagattgattaaaattcaattgtgttaaatttaatttataggagtgtttgatgatgacagtatattttacagcagaagctacaacaaaaggcggaagagaaggtcatgtaacatctaatgatcttattattgatttggatttagctatgccaaaaccaaatcaagtatccgcggctacaaatccagaacaattatttgcggcaggctattcagcttgttatgacagtgctcttcatttagcagcccagagacaacgattaaaaatcgaatcagctgttaccggtaaagtaagtttattaaaagatgaaagtgataatggttataaaatcggagttgttctggaggtggaaattcaaggggtatctcaagagcaagcggaagaattaacacatgcagctcatcaagtatgtccatattctaaagctactcgcggaaatattgatgtacaaatcattacaacagcaatgtaagacgaaagatgccaagatcaataggtaatagaataaaaaaatttgattaaaacatataggtgaccagccttcaaataaggagtgagattgatgttaaagaaagtacaattagaaaaagcagctcaagaatttgcagaagcaaccgcgaacccaccctatctattcgaccttggacctgagaaaggacgagaagctgtagatgaggttcaatctgccccaattgataaactgccagttgatattgaagatgttatgatttcaggaggaccgagcggacaggtatcagtaagaataatgcgcccgcagaatgcgcctgcgcaccttcctgtcatcgtgtacattcatggggccggctgggtatttggtaatgagcatacacatgatcggctcatccgtgagctagcagtcggagcacaagctgctattgtctttccaaattacaccttatctccagaagcaaaatatccgacagccattgaagaaatctatgcagtagtgaagtgggcatctgaaaatggccgtgagaacggcatgattcccgagagtctaacaattgcaggtgatagtgttggaggcaatatggctgctgctgtcacgctaatggccaaagcacgaggtgacttgaatatccggcaacaattacttttctatccggtaacagacgcttctttcgatacggaatcctatcaccagtttgctgcaggatactttttacgcaaggacgcgatgatgtggttttgggatcagtacacaaccaattcgaacgagcgtgctgaaattacagcatcacctctgcgtgcaactgctgagcagcttcaagggcttccatctgcattgattatcacagctgaagctgatgtacttcgtgacgagggagaagcatatgccaataaacttcgtgaagctggtgtttcggtcactgccgtacgtttccaagctatcattcacgatttcgtgatgctcaacgccttagctaaaactgaagctgcgcgcggagcaattgatctcgccgcaacctggctgcgtaaagggttttaatccatttattgtttcgtcacatagagactgctgcaaataaataaaaaacaaacagatccactcaaataattgagtggatcgtatattggaataatggaacttttgatgagctttttaatcgggctggttattattttgttgttgagatgtccctaattgaaaagctaactccacaacaaactccgttttttcaccagttcaccctcttcatatccaaaaaacctttgttgattagttagcgtacaagttctcgttttctgctttggaccccatacagaaaataaaaagccagctctccttcgggagaagaactggcataacaaagcttcttgcttcttattttgctgtattgcccggaccttttaatttctcttcgttcttgcgtcaatgttttattattaggacacaaccaataaaataatgacgatcgagaatagcaacgctgcatttgcaaagcagtaagccctccagaatataaaagagctgcagtcattgctgctcggataatcccagcttattctgagtctgtatttcgagtagtcggtcaattaaatggatgtttttttcattccttttctgtttgttccattttccaccacagtgaatcttttggattttcaacagcttcttgaaactcagctttagaagcaactgttgggtaagaaccttttaaagatttacctgaagtatctttaaataaggttaacacaactattaagccaattaaactgactgccaataaatagaaacccggcgccaaattgtttcttgtcacatgggttaaccaagaagcaactaaaggtgttgttccgccaaaaatagaaactgataagttgaatgtccaggataatgtacgatatctaatgtcagtatggaacaacgtaggtaaagatcctggcatagtaccttcgtatacagataatacaatacctaacattaaaagtcctataaataagaatgttatattccccatattaagaaattgaaaagagataattgaaaatacaattcctaatactaatccaattgttataacttttttatttcctaatttatctcccagtttaccaaaagttaaagcgaacggtaccataataatcaatacaattgctgtaaccggtgtacttatattatcacttataccaaggttctcatctaaataagaaggcatataccctaataataggtaattggttatattgaaaaatgccacaaatacgatacataaaaagatatcttttttatatgttttaatgacttctaataaacctggttgttgttcttggttttcagagatgtcactttcaaagattggtgattcatctagatgacttctcaaatataaaccaaataatcctattggaatacttaagaagaaaggaattctccatccccaactattcatttgaacatcagataaagtccagaaaagtactgtaactaaaacagaagctactatataaccagataatgtgccgatttctaaaccgctgcctaaccttatacgtttattatctggagaagattctgcgatatataccattgccccagcgtactctccacccacagaaaagccttgcagaatacgggcaaagagtaataatataggggcccataccccaatctgatcataggtaggaagcacaccaattattaaagtagataaagccatcattaaaatagtaattgttaatactattttccgaccaaatttatcacccattttaccaaaaataattccgcctaccggtctaagtaagaaggcaattgcaaatgtagcaaaagtaaatattaactttaattcatcgttttgaactggactgaaaaagtttttactaataataactgccaaataagaatataaagcaaaatcaaaccattccatcgcgtttcctatccctgtagcaaacacgcttttcttcgctttttgaatgtctacaacgttaatttttttcttgttaaacttcatttaataatatcgactccttaattatcaaatccacattatacaagcgcgtaaacggtccgagcatgcagtcccagaatgtatagcgtaatgcttctctaaaagtccgggggtttctgtttcacctgatggagagctaacggcatagtggctgattggttcaactgtaccttaaaagactagactaatatccatatcagcgccaaataacattgtaaaccaggaaagaaggatgaaattaagtgttttcgctggtttccttaacttatttttgccgattgggctaaaaataatacaagaagcaacaaaaagagaaacagccaacagataataccagcctaagcggttagtgagatatccttgggttgtggttggtattttctgcagacgatttggagaaatgattccccttcatacagctctattgtgaatatgatcacaatcgaaaaaaaacttttatttcttcaaagtagcctaaacctttattttagatcttccattacgtcttccaatatgtttattataagattgaggtcgttcctaagaattatttactgattctatctttattaccccacaatcaggtgaaacaaaacactataaacgtagcatacctttttaaaacctgacaagcccaacggggtgatagaaaccaggctaaagccaagctagtcaatggatagaagaaatttttttgtttttcccaaggaataaccgtctgcgtttaatctagcccaattagaaagaaaaagagcaggagtaatcctgctctttcattcaaaactttaatttgtatgacgaatttcgtataccttttcaactttctttaccttagactacaacagaaataagtagcacagggtatgaaataatggttttatttaaacagtcaatcaccgacaattgaatttattgcatgacacctgacaaaatttttttatccagctggaaataaagtaacattttttaaggtaatggatttatttttgttcaatgattaaatgatccccaatgacaataaagactaataattactaaaatttcaggaaaccccaatattgcttatcttaattattgtttaactaattggtaattgcaacagtaaacttatacttatggaaagttataccaaccgaaaattttccgactcaagtctgtttaaccagttgtgaaccaatgaattaaatacatcggtttgttcgatttgcaggttgtgaccagccatatcaagtactgcaaaagttgcccttgggtaatcttcgagtagccgccacgcatcatggtatccgactacattgtcctgacgccctgtgataattagcgtgggataatcaagtttagatgaaatatcgaaggtaaacccatatccattttgacgaatgttgtttacgaattcataatttgtttgtttagatggaagtaaaatttcatcccgaaacctctcccattcagttttaccttgcacaatccccatagagcaaaattcattcgcctcctctgaagacaaatgtgatatcaagtcgctgtctctttttagaacagtcttctgcggtactaccctttcatcgaattcgggtatagttaatggtgccatcagcagtaatccacgaactgtttccttacgtgaacgaacgatacctctggcaatgtaccctccatatgaattaccgcaaacaataaactgttgatcaggaataatctcgtccaaaagacgcaatatcgcttctaaaacatcatcagagttctgaatagatggttgtggcttagaatgtcccatacctggtaagtctatgtatattctcttccaaccgcttcgtttctcgaataacggttccattgcatttaacatcacctgatggtcaagtgtccaaccatgcaacataacgatcggatatccatctccaattactttatggtaaatcgacatgtagttgttccccttccctgtaatcctaatgtttcgacatgaacatttaatcctttcatacatttatcacaattttaacaaacttttaactgaacttggtaagttgaacaagggttatacattgaatttcgacaatcgcaaactgtcatatgtgtccgtcatatcaaaagaatctgtttaatgtgttgtttagtgctttcgttactgcgactatcgacaaataagaaccaagcaaagtattgtccagatactttgagtattttgatcactttgaactttaggtaagtgggcagtttgtgggcagtagatcatttaaaaataagcgcaaaaaaataccaaggatctctctattacccttggtatcattgggatgcggcgagaggacttgaaccttcacgggttattcacccgctgggccctcaacctagtaaaaacctatcatgagtttcaaaagcttttattcaaagcatctgtttattttatttatacttattttcatcatttttcatgaattccgagcacaaactgggcacctattagagaccaaggaaatctacatttcaacaagaaatatctactcatcgccctgctgtaattagtttatttcagcttccctcgcgaataccggatcaatgctcagctttaagatagtcaaccaatttctccgcactgttcttaacatcttcttttgaaaggtgaagtgtaccatattgtgcaaaggcaggaagaaaacgcattcctatatagttagcagtgatttgaaacggtctgataagctcgctgatcgtgatattatattctccgcctgcttgataatcagattcctgtgcgcctaaggagatagctaagagtagttctttgccatgcaatttagtacctccagttccataagcccaaccatgtgttaacacatcatcttcccattgtttgagtaacgcgggactgctgtaccaatacattgggaactgaaaaacgatgcgctcatgatctaacaggagctgctgctctttttctacatcaatgataaaattaggatattcaccgtacaggtcatgaaccgtaatgtcattctcttgctttaaacgattcatccaggttttgttgacaacagacgtttccaaattagggtgtataacgataactaatgttttcatttgactgattatcctttcttcgccgattagttattattgcttttacgataatgaattgaattaattttaaaatatcaactttatttacacctattttatcctttttcgtgaattcagggcaaataattgggcaccgattacatttatagccaaaaaaagacttaaccttttaaaaaagattaagccttttcagtacctttatgcccctaccctattatctcgtgtctaaattctaatagctgataatataacaaggcctctttgttttcctccatgcttagcaatactttctctgccttttgcaaattggagtttgaggcattagtaactacctataatgatgaaaatatttgtgcgacgtcaactgtagatgacttactccaggtaagtgggcagtttgtggatagtagatcatttaaaaataagcacaaaaaataccaaaggcggttaaacccttggtattattgggatgcggccgagaggacttgaacctccacgggttattcacccactaggccctcaacctagcgcgtctgccattccgccacgaccgcgtgctatgaagctgtctttccactaagcatataagctagtgatgatgatcagcactttgaaaagaaagtgcgggtgaagggactcgaacccccacgtcgtaagacactagatcctaagtctagcgcgtctgccaattccgccacacccgcgtgacaagtggtgagccatgaaggactcgaaccttcgaccctctgattaaaagtcagatgctctaccaactgagctaatggctcgctctaaaagtgattcaaaatttttaaataaaatggctgggctagctggattcgaaccaacgcatgacggagtcaaagtccgttgccttaccgcttggctatagcccaacgaaggtaaatggtgacccgtacgggattcgaacccgtgttaccgccgtgaaagggcggtgtcttaaccgcttgaccaacgggccgtctggttgagaacttatctggcggagaaggagggatttgaaccctcgcgccgcttacgcgacctacacccttagcaggggcgcctcttcagccacttgagtacttctccataatggctccacaggcaggattcgaacctgcgaccgatcggttaacagccgatagctctaccactgagctactgtggaatgatcagactttctttattataaatgatgcgacatattgtgtcaataagcaacatttattttttttgagaaagcatcgttgtctctcaacgacttttataatttaacacagatcattgaaatgagtcaagcctttttaaaaaattcttttgatttttcctctgcactttccgcaggcatatctttccgggttcattgcccgcttctttatatactgttggccgcaggcctcgcatctatacatatatgttttcttttgtgtctttttggtttgcagcggcgtgcagaatcttggcgctccgactttctgaagcaggtctctgaaatccttgtctctgtgcttgtacccttttccctcaagatgaagatgataatggcacagctcgtgcttgatgatgcctaccagctcgctccgtccgtgttcgagcagatattttcggtttaattcgatgttatgggaagacagcatgtaccggccgcctgtcgttttcagccggtcattgaaaaaggcccggtgacggaacggctttccgaaatcctgtgcagagatgtcttccgtcagcttttgaagttgttcgttatccatatgtgcaccccgctttaaaaacattgaacgggacaattcaccgttcgcatacaatgtgttaaaaccgacctctaactaaaagctgaggaggaatgagccatgccgaattggctgatgaaacaaatgcaaaaagcgtttttagaaaaggacaattaccaaatcaaactgctgaaccagtgctggtatttctacagaaaaaaacactgctcgtaagcagtgcttttattttaccatagacagcgacactctgcctttttgcacgtccaccccttcgacccatacggtgacgatgtctccgaccgatacgacgtcgagaggatgtttgacgaattgattgctcagttttgagatgtgcacaagcccgtcctgcttgacgccgatatcgacgaaagcgccgaagtccacaacgttccggacggtgccctgcaattccattccttcctttaaatcctcaagctgcagaacgtcttttttcagcaaaggcttcggcacttcgtcacggggatctcgctccggccttgtcagctgcccgcaaatatccgcaagcgtaatctcccctataccgagctcctcagccgtttcagacagcggcagtgcgctgattttctcttttacgtccgcgcttccgatctgatccgcagtgagctgcagttttttgagcagcgcctttgtctctttatagctttccgggtgtatcccggtgcggtcgagcggctcccgtcctccgggcactctcaaaaagccgatgcactgttcatatgtttttgcgccgagacgcgggatatctttcagctctttgcggtttgtaaattttccgagctcttccctttttttgacgatattgccggcaacggttttggataacccggctacatattgaagcagcgcggctgatgctgtattgacattcaccccgacttggttgacgacggtctctacgacaaaacggagagattcgtttaaatgcttttggctgacatcatgctggtattgcccgacaccgacggatttaggatcaattttcacaagctcggccagcggatcctgcaacctccgcgcgatggagacggcgctgcgctcttcgacctgaaaatccggaaattcctcacgggcgatttctgacgcggaatacacgcttgctccggcctcattgacgatgacataataaatgtcccgctctgtttctttcagcacatcaacgacgaattgctctgtctcccgtgatgccgtgccgtttccgatcgccacaacctcgacttcgtaccgatccagcaattctttgattttttttcgggcttccgctgtctttttgacgggagcgtgcgggtaaatgacatcgattttcagcacttttcccgtctcatcaacgactgccagtttgcaccccgtgcggaaggccggatcgacgccgagcacgacttttcccttcatcggcggctgcagcaggagcttacgcaggttttcagcgaaaatatggatcgcctgcgcgtctgctttttctgacagttctttgcggatatcgcgttcaatagccggctggatcaggcgtttataactgtcctcaatggcttctttcagcgtttctttcacaggtgtttcacggtgtttgatgatttgcttttctaaataagcttttatctgatcggcgggcggttcgatcgcaatctttaaaatgccttctttttcaccgcggttcatcgcaagcactctgtgaggaacgaccttttggatcggctcttcgtactcgtagtacatctcatagacgtttttctcgtcatctgcggctgacttgcctgccgcggaagtgagaattccttttttatacgtttcctggcggatccactttctgaaatgaggatcatccgagatttgttcggctatgatgtgcttcgcgccttcaatggcttcctctcttgaagcgacttctttttctgcactgatatattgatcagcgacgtcgtgaaggcggttttctttcgggagagaaagaatatagtccgcaagcggttcaaggcctttgcttttggcgacggtggcttttgttttccgtttttgtttgaagggcggtataaatcctcgacttcctgaagcttgaccgcttgctcgattttttgcttcagcccgtctgtcagcttgtcctgctcggagatcaatctgatgacttcttctttccgctgcgtcaggttttgtatgtattgccaccgctcggagattgcctgaatctgcacctcgtccattgagccggtctgctcttttcggtaccgcgcaataaacgggacggtattgccgtcttccagcaggcggatgacactttcgacatgtttttgggataacgctgtttcttcagcaatttgttttttcaaaagggctaacgtttccatatcacaaaagcctccatctcttctttctttctctagtgtatcaaaaaacggcggaacataaaaaaagcagccttacgataaaagctgcccgagaatataggtcaaatcatcacgtctggatgttgtgtacggatgaagtgattttgatatttcttctattgagtgtccctgctttaagcaggtgcggatatgcggaacctcaagcccatccgtgtagatgatgaatgtcgcccctttttcgtatgatgacgtatacgttttgtatctttgcggtttgcctgagaggtaacccgaaatcggcagcggatgaaaaacttcgcctgatggggagtgcaggaagaaacggacgttgccgatcgagcagtatgtcaattcccttttgatgaaattgatttttaagatggaggcagtcgcccctcttttgtttttcatcgcttgattgcagcgctcaatgatgctttccacatcctcatccgcatacgtttccacgatgtctttaatggctgacgaggattcattggcaagagatccgctgccgagaccgtccgctaccgcgcaaactaattcttcttcattcgccttcataaaaaagctgtcgccgcatatggacttgccttctttatttaattggtatacaagagtttgaacatgttcattttcttcaacctgaatcattacattagctccatggagggatctccaatcaaggcctctctcagttttttcaccgctttccgctgcaggcgcgagacgtgcatttgagatattccgagaatgtcccctgtttctttttggcttttattttgcacaaatgttagatcgataatctgtttttcgcggtcggacagcacatgaagcacgcttttgatcatcatctgctggttgacgcgttcgtatccttcctcctgcgacccgacgatatctaaaattgtgacggtgcttccgtccgcatccgcttcgatgctgtgatcgacagaaagcgcctgatagctttttcccatctccatcgtttcaagcacttcctcttctgacacatcgagaaaggctgcgatttcttcgactttcggcgaccgctgcgtctctgtcgtcagctgatccaccgccattttaatgcgcggcccgagttctttaatccgtctcgggacgtgtacgctccatgttttatctctgaggaagcgtttgatctcgccgatgatggtcggaatcgcaaatgcttcaaaggatttgccgacctcgggatcataccgtttaatggctccgagaagtccgatcatcccgacttggcggagatcttcgtgaaagctttttccttttgaatatttctttgccagcatttcgacgagattggtatacacctcgacgagtgtttcctgggcttctttattatcatgtgtttgaaagtcgcgtatgagccgatcaacttcatctttagttagtttcgtagtttttgatggttgtgccatgatcaactcgctccccatttaaatactttgtcatcgccacggttacgccagagttgctttgaactttgacttcatccatgagcgtttccattaaatacagaccgagccctccttctgacaattgatcgactgtgtgcgaaggtgtgtacggcccgagatcctgctgcttctgatcaaaatcaaagctgtctccctgatcggcgacaatgacctccagccgatcctcaaacacaccgaaccgcacggatacttctcccttattttcatctttgtatgcatgctggacagcgtttgtacaagcttcgctgacagcgatttttaaatcttcaatgtcatcataggtatagcccattctgctggcgactcctgataatgtaagcctgacgattcctacatattccggttcggccggaattttcatctctatataatcaactgatgtactcattgcacgccaccttctgactttgccgaaatgtcgatgatgtccttaagccccgtaatttcaaacagacggacgagccggtcggaaagattctcaagcttcagagagccgccttccttgctcaccgttttaaacacgcctacaaaaacacctaaacccgtactgtccatatagtttacatcttttaagcagattctcatgtccttcccctcgtttgccaggggcatcagcttttcacgaaccaccggagctgagtatacatcgatttctccagcgatattgatttgtatatctgaaagattctccttcatatctaccgttaaattcatcgtatcacctctgaaagttatccttactcgtgctaatggctttttacccgtgctgccgtttttttaaacctttcttttcaaaacaattaacgtaaaatcatcatgaagctgaaagtcctgaagtctcagcaggctgtcgtaaatatttttgaccatatcctgcgcggagcagtccatatgttcttccagcatgcgctgaatgtcgctgcgttctaagaaaccgttttcggtacggcattcggtgacgccgtcagaaaaaagaacgatcatgtctccttcgtccatgtgctgttcatattggctgtaatcaaaatcctgggaaattcccagcaccaatccttttgcctccagatcataaaactttttttctttttcagagtagtagaagcccggttcatgccccgcagaagcatatgtaaattggtgatttttcgtattgtagtttgcgtaaaacatggtgataaacatgcttgagtccacgttctgttctacaacgcggttaagatttttcagcacttgggaggggtgaatgccgatctccggaagagagtccatggcatacttgatcatcgacatgcacaatgcggcgggtattccttttccgatgacatcggctatcgcgatgttaatcgattccttgtctttgacaaagtgataatagtccccgctcatttgcttggcggggacgctgatcgccccgatatccagttcttcttcttcaggaatttttgtgcccagcagcgtctgctgaacatttgcggcaatttcaatttctgaacgaagctcctgctggatatctctcagactttggtgttcctgataagccatcccgtagccaatcatgacttctattaaaaaatccagcgaatgaaaaacatcttccggcagatccggatacagttcctttaccacttttcggtggatgctgatgatctcctccggaggaacctgatgttcaatcgtttttcggctgaatttttgggcttgatataaagatgtttctgttaattcggctatatatcggctaagcagctgatgataccgctgctctataacctccctgaaatccacgttctaacctcctaccgaagccattttacggcttgaatctctgttccttcctctgcaacagattgcaggctgaattcgtccatcagccttttcacgcccggaagtcccgctcccagtccgcctgacgttgaaaagccgtcttccatcactttacggatgtcggggattccgggtcctttgtcttctgctataattttaaggccttttttccctctgtcgtttacttgttctatgctgacctggcccttgcctgcatataagtaaatgtttctggccaattctgagatagccgtcgtgattctggcctggtccaccgtgccgaagcctaattccttcgcaacgttgcggccaagctgtctggcggctacgatatcccattctgtcatgattttcacacaggattggtcgttcatcgctattcccccaattcccgcttcaatgtctcaagcccttgctctaaatcgagcgccgtttcaatttcctcaagtgagattccgagttcaatcaatgtgaccgccacagccggctgaattcccgtcaatacgacctttgcgcccatcaatttagacatggtgatgacatcgccgagcactttcgcgataaatgaatcaatcatgtcaacggatgtcaggtcaatgacgaccccgtttgcgccggtttcatagattttgttcagcagatcttcttgaaaatgcaaagctgtctggtcgtcaagctcccattggatggataccaataagcagttatacagtttcaggatcgggatttttggatgtctcacaatgttattcccccaatgaaacgatttttcgatttgtcatttcaagcgctgtttgaattcctttttgaagggtattcttcgtaataacctgcgacaaatcaattcccagattaacgatcgtctgcgcgatttccggacggattccgacgagcagacatttcgcgccgacaagccgcaccgcttctgatgcctgaataatatggtgcgccaccatcgtatcaacgaccggcacgcccgtgatatcaattaatacaacctgtgaacggtgctttacgacgccgtttaacagattttccataatatgctttgcacgctccgtatcaatcgtcccgacaagcggcatgaccgttacatgctcaaataccgggatcagcggagccgacaattcctgaagcgcgattttttgcaaagtaaccgttttttcccaggagatagaatactgatttaagatttccgtgttgatcggattgaaaaagctgtctatttccaaaatcaaatctgctctgtcctgatcggccatattaaggtcgaccatcgtttcgtaaagcagtttccaaaactctgacagggtggctgaaagaagtttcagcgacaggccgagctgaacggcgcgcagtgcgagttcactgatctgctcttcggcagcctcgtcattttttgtcgataataaaagaatgtctatataatctttacaaatattttcacatatgtgattcgtaagctgatagtcttcctgattgcctacttcttttagtttggctgtccaagtatcaagcagttcatcatgctgatcaataatgaactgatacactttctgattcgacatgggtttcactgacctcccgacacaaaacaacaaattttgtttgattatttctttattatagcgcttatgtttttcgaaaacaaaaaaagttgctctatatgagcaaccaaaatatgactaaaaatcaatgagtgccaaactgatttgcagggcttcatcaaccttatccatcatttcatcatccagatgagttattttatccgttaatctttgcttgtcaatcgtccgaatttgctccagcaaaataacggaatctctttcaaaaccgtagcgttttgcatcaatttcgacgtgggttggtaatttcgctttctgtatttgggctgttatggctgcaacaatagcagtcgggctaaagcgatttccgatatcattctggatcactaaaaccgggcgtacgccgccttgctctgagccaacaacaggagataaatcagcaaaataaacatcgccgcgctttacaatcaaaatgattatcctccgctgactaagcgctcaacggtcgtttctgcttcgcactcagcatagtgagcctcagaagagatattcaagttgattttcgccatttccatatacccgcgtctcatcaaatcacggttatggcgagttgtccgttcgctgacatacgctctcactgcttgtgatatcagttcgtttctgcttcgtttctcccgcatcgctacaccatccaattcagctactaagttttcgggcaagctgattttcatttcggttcttgcgctggattcagacaaaaaacatacacctccaccaaacttacggatacgaccaattcatccatccagacataatgataccattattcaaacgtcaagcaaagctgttttataaattctctttttccggatgacggctacttgtttgtattatcttgcagtaaaggatttcttacttccattatactctcattttccaaaaacatacggggaacgcgggaactaatggtacaagggacctcgtaattaatcgtctcaagccgccctgcgatttcatccatcgtgatcgtttcttccttctggctgccgatcagggtgactttggtgcccggcggataagattgatctaattcgaccatcaattgatccatgcagattcttcccgcgatgttcatccgtttgccgccgatcagcacagacgtgccgctcagcttgcggagccacccgtctgcatagccgatgggaaccgttccgatccattgatccttctctgccgtatatgttgcgccgtagctgacgctttcccctttgcggatctttttcacatgggataacacagagtgcagcgcaaaagccggctttaattgaaacggaatttcgctttggatgtcagcagaaggacgaagcccgtacatactgatgccgaaacgaaccgcgttaaagaagccttttttaaggcgaagtccggcggcgctgttcgcgcagtgcaccatcaattcttttaaagggagcggagcgatcaatgttttaaagcggtcaaactggaagaggaaataatctctgtttttctcatccgcggtagcaaagtgggtgaaaacgcctttacagactaaaccgggattttggctgaggatttttaacacgctttggatttcttcctccgttttgactccgagtctgttcatgccggtatcgactttcagatgaaacggcaatgtggcacctccgaggtggcgcgcagcttcctgaagccattcaacagaatatcccgtgagtgttacgtcatattcggcagctgcttgtacatattcgggcggcacggcgccaagcacaagaatcggcgctgtaatgccccgttttctcaatgaaatcgcttcatccagtatggctacggcaagacaagaggcacccgcttcaagcgcggctttcccaacttccaaatctccgtggccgtaagcgttcgcctttacaaccgccatgagatggacgttttgcccgatgtgttttttcatatgcgtgacattttctttaatcgcggacaggttgatttccgcccacgtttctctgtaaaaggatgctgtgttcattcgatacacttcctagcattattttcaattcatattgttattatcatactaaaattattctgcaaagtgaaatggaatcaaaaaagagaccgacagcggcggcctcttttttgacattattttgacgactgtccctgcatgcttttggcggcggccaccatttcatcctttgtcagatcctgtgatgacagaagataatccactccgtcatatgtccacgttaaagacgtatcagataatgcggccaccgtgaagccgagattaaccggttcgcctttcagcgtgacggcagaggcggcttttgcgatatgggctttttcttgaataagggtgaaggatttttctccgccgtaagtcatgacgatccgtttgccgtccgccgttgaaatatctttctcttcaagctttttgacgccggccggcacttgaagcggtgttttgaccgcaaatgaatcagacggcttggcgcttgtggcgacgtccatctgggaaagcgtcatatttttcttctcgtcaaaagagtctttatcaaacggcttgttgaattcaaagcttttgaattcgacttttaccatcactttccggtctgtatccatgactttgacgagcgaagggctcatgtcctttttgttgaaagtgatttcctgagtcggcagcattttgttgtgctgatagtttgtttttgtttcaaacgtgtactttttatctttggcggaatagacggcgtctttgtcatgctgcacgtcctttacaagtgactcaaacaaatatacttggctgctgttattcggccagtcgctttggaacctgaagctcttatttaaagacggcgtaaggacaaagactccgttggcgttccgtaaaatgacttggttttggtcttttttcggattttccagatagacccggtacagggaaggttttttatgccagatttccacattgtatacttgcggatcactccccgtctgaatggtcattttggctttcgctttgtacgaggtgtattctttcgccttcttatctaaaccgttcacgatatcttcctgtgatttttggccgcaggccgaaagaataaggacggcaagcagtcccgttaaaagcaaaacaaagctttttctcaccttttttcaaccccttcttctcaattgatgtaaagggaagaaatcgcttgtttgactttaacggtacgccctgaacggacggacgcgtaccataaaagcctcaaacaacttgtctcccttaatgcactatcaaatatatgaaggggtttcggctaatatgcagactagcgtgacaacctttcaatcacgacctgtgccgcggcgtattcttttgtatgggtaatggagacgtgaaccgccgcgccgtccagcttggcgcaggtcagcaccggcttgcccgccgtgtcgtttccggtttcgatatcctgaaagctgagctctttgccgatacccgttccgtatgctttcgaaaaggcttcttttgccgcaaatcttcccgcgagaaattcaattttccttttgtccgacagcaatgtaaaacgggcgtattcagcctccgtcaatattctttgcggaaacctcgcctgccggctgagcatgttttcaattctgtgcagttcaacgatgtcgattccgattccgaaaatcatgtgaattcctcctaaaagtccgtactaaaaaacggtttatgtcataaacgtgttactatatatgtaacaaatcagatgcaaaggggcttgcgatgtttatacgtacggaaaatttccagacttttatcagacgttatccggccgtcagctgtatcttggcgctgcaggcgttcttgtggctgtttttcagtatgccgcttcattccgtcatgatgtggtcagatgcagtgaccggctataattacggcgtttcctcgggagaatggtggcggctggtgacaccgatgtttttacatgcgaatttcactcaccttttgtttaactccatgtctctctttttattcgcgcccccgctggagcagatgctcggaaaagtccgttttttgattgtgtacatcgcatcgggcattatcggcaatatcggcacatatcttgccgaaccgcttgattatgtgcatgtcggcgcatccggcgcgattttcggacttttcggcgtgtatgtgtttctgactgttttccgcaaggagctgatcggccgggaccagtcgaaaatgattatgaccctgcttatcatcgcggtactgtcgacgtttatcaattctaatattaacattatggcgcatttgttcggactggcaggcggatttttgctttcctttttatgcgtgcagcaaaaaaagcggcggtattaaccgtccgctttttcatatgaataccagcgcccgatgcgttcggcatcttcctcgctgacatccttcagcatgacatgctccatgtggtgagctgatttcactgcggtagccacagatgcgagccgccttcttttttgcagaaaggagcggctgacttcaaacatctgcattcttcttctcagcataatcgtggtcgtcttcccgatcagccgtgtggtgagctgcagccggcctccgtttaagcaccatgacgcgctcttaaatgaggcgtagcccagcaccagttcgacgggaagcacaaggagcgatgcatacccccacggtttaaacagaatacaaagcggaatgatcacgaaaaccgagaagataacggagcggaataaataccggcgcagcgcccttttcggcaaatgattcctattttcttccagtacgtaatccggtgtgaaaccgttcagcatcacaccgagctttgatttgcggatgatcggaaacagaatcgtctgagctccttctttctcattccccgcactgccggcgctgacaatcgcaaccgtcgcgtatccgaataactgcctgatcacattttctttaattttaatggcttggattttacggagcgggatggtcacttgatgtttttcaataattcctctcgtaatgaccaattcgtgttcctttttttctatcttaaagttggcatgcttgatcatcataccggcgatgcttaacagccaggcgatgaacaatcctataaaaatgatcacggcgtatatgccgatgctcgcatgcttgagaaaagaaaacctgtcgtagaaccagtccatcggaagtacttcatcaagctgagaaaagagggcgaataccgctgagatgatgacaccgatccccccggatgttgaggcggccataagcagctcacccacagacaggcggtaaacggattgcacatcttccccgcgcatcggctcctgctccgctgcggtctcccctcgttcttcttgctccgctttttgctgaaaaacagccgctctgatccgttccgcctcttccacagtaatggcggataagacggcctcggcgtttttcccgtcgccggccgtttcgatttgaagcttaacaagcttaaaaagctgctgaacgatgccggcactcgtattcattgattgaatccggtcaatggagatgtatctctttttcgtaaaaaacaagccttcttcaattctgaattctccgtcctcaatccggtatgtaaattttctccactcgatcacacttgccgtaatcagccagataagcaggacagcgagcgcaatgcctccgtaaaagcggatgaagtggttggaattaacaatatagacgagaaaaaatggcagaataatgtttttaatggtttcgataataatatggaataagttcaaaatcacggccgccgggtgcagacgtttcggttcagacatcatcttccgtcacccttgccagacgggaaatggaatccctcagccggtcagcttcctccatatcaagcgccggaatggaatgaacggttgccgccgtagagattttgactgaggccaggcggtaccttctgaggagcgggccttgtgaagtatctacgtgctgcaccctcaccatcggcacaatgacccgtttgactataaaaatgccggattgaatatcaatttcattttcatggacctcatagcgccagatcctgtgcctgattttcggtatggcatagacggatatcactgaaccgatgacccaaatgatgccgaggactccggtgatccaatacggccaatggaagaaatggcttaaaacagctgctgctataacggccagaagacagaaggcggacaggatgatttcctgaagacgccagacttttaagccgcttggactgattcgattttttggctgtgctctcaacatacctacctcccattttttatcatacatacaaatacggctgatttgcaaaaaagattcactttccggcatatcgaaaaaaagcggaccccgaaaaagggtccgcttcctgtgttttagtatgattttttctggcgtctgtcacctgaagaacggcggtcgcttgagcgttttttatcgtaggaagaacggttgttgtttttccctttgccgccgcggtagccgccgccttggccgtctctgcgcttagaagtacgctggtttttatagcgtttgctgaccatcggcgcttcatcagtgaggcgtacaggcgtgctgtccggctcttttgtcgccattttaatggctgcagccacaactgtcactgcatcatgatcttctaacaattccgcagctgccgtcatgtagaagttcaggttgttttcgctgatcgccgtgcgcagacggtcaaccgtcacctgctgctgaccttctaatgcttcgtcaagcgtcggctctttcatgcggtccattttgcgttttgtcgtttgttcgatcgcgcgaagcatgtttttctcacgcggtgtgataaacgtcatcgccatacccgtttttcctgcgcgtcccgttcttccgatacggtgaacgtaactttcaggatcttgaggcacgtcaaagttgtatacgtgggtaacacctgagatatcaagtccgcgggcagcaacgtcagtcgctacaagcacttcgatcgcaccttctttaaacttgcggagcgctaccatacgcttcgcctgcgttaagtcgccgtgaattccttcagccgcatatccgcgaaggttcagcgcttccgtcaattcgtcaacacggcgttttgtacggccgaatacaatcgcaagttccggagactgaatgtcaagaagacgagtcagcgtatcgaattttttgcgctcctgcacttccaagtagaactgctgaatgttggacacagtcatttctttcgcttttacttttacgtgttccggctcagtcatgaaacgctctgcgatccgtttgatcggcgcaggcattgttgctgagaataagagcgtttggtggtcgctcggcacgtttgagagaatggattcaatatcatcaatgaatcccatgttcagcatttcatcagcctcgtccatgacaaccgtgttcacgttgtttaaacggatcgtgcggcggttgatatggtcaagaagacgccccggcgtacctacaatgatatgcgggtttttcttcaatgcgcggatctgacgtccgatatcctgaccgccgtaaataggcagcactttcgcacgcttatcttgtccgattttatataactcttcagatacttgaatggctaattcacgggttggcgcgattacgattgcttgaatattaggagactcggggttcattttttcaacaaggggtataccgaacgcagctgttttacctgtacctgtttgcgcttgtccgatgacatctttatttaaaagtccgagcggaatcgtttgtgcctgaatcggtgttgcttcttcaaatcccatacgattgattgatttcatgagatcagaacttaattggaaatcttgaaacgttatagtcaaattattcaaactccttctgattgctgtttcagtaatgtcgtgatttaccactaaaaactgccctttcatccaaaggacaggatcatacgtatacaaagcccgaattactttacgtttaatcttaccattacactatgtgtttttcaataaggcgagatggtcaggcggccggaagcggcctgaccggattcttcccgcaaacgaggccggaccccgcgccggacgggatttcccagccggcggcctttctttttcatacggacagaattatttcaccctgaattagtttcttcatttttgtatatttttataatgctgatcagtattttttcagttcttctctaataaatctttaacgatttcttcgagcttcatacctctcgatgctttaaacagaaggagatcgccggaagcggccatatcctgtatggcgtgaagcagttcttttttgtcgagataatggctgacgcgcccttcttcaaaatgccggcgcgctccgtctgcgatgaatgcgccgagtgtgccgtaagtaaatacatggtcaatttccgccggattgatcgcagctccgcattcttcgtggaatgctttttcttcatcaccgagttcaagcatatcaccgagcacgagcattttcttccgatagcctttcatcgtttcgattaattcgaccgccgctttcattgacgtcgggctcgcattatacgcgtcgtttacgatcgagatgccgttttccgttttaaccagttccaatctcatccccgtcaccttcaggcggctcagtcccagagcggcattttccggcgtaatgccgaaatagatgccggcggcgtatgcggccatggcattcatcacattatgtctgccgagaaccggaataaagaaagaacgttcgatcccgtcgatattgaagtacgtgccttcttccgcctgttttatttctttcaggcggagatcattgacagcgcctgcgccgtatgtcgttgtccggcaagtgtacgccttttcgcggagcaacggctcatccccgaaataaaacagaacgccgtcttcccgaagtccgtttataatttcaagtttcgcctccgcaattccttctcttgagcctaaatcctgcatgtgggattcgccgatattggtaatgacggcagcttccggttcagcaagacggctcagaaaatcaatttcgcctctcgcgctcattcccatttctaaaacggcgatttctgtatcttcaggcatggcaagcacggtcagcggcaggccgatatggttgttgaaattgccggcggttttgtgaacacggtactgagtgctgagaacggcgtgaagcatgtctttcgttgtcgtttttccgttgctcccggtcaccccgatgacccgtgtgccgagttctttcaaataagctttcgccaatgtctgcagcgcctccagcgtgtcatcgacaaggatgacggcacgctcttccggcggattcggttcagagcggtcccacaacaccgcggaaacgcctttttcgaatgcttgcggcacaaaggtatggccgttaaaatgctcgccttttaaaggaatgaacagctgatttttttccaaagtccgcgtatcggttgcggcgccctcaatcattgtttgttcaaatacaggatttgtcagtgtgcctttgaccatgtcggcgattcgttttacagttcgctttatcaaaggtggcacctcgctttctgaaaatgttgtctgttacgggaaaagacactgccccttcaggcagtgtccgtcttcattaaaatgtatgtttaatcagctgtttttcggcatggcgttcttttgccagctcaaccagctgttcgatcagatcactgtaatctacgcctgcttctttccaaagcagcgggaacatgctgaatggcgtaaagcccggcattgtgttcacttcgttaatgagcacttgaccgtcattggtcaggaagaaatcggcgcggacaaggcctgatccgtcaatcgctttgaaggctttaatcgccatctcgctgatttccgcatattgttcatccgtcacttgcgcgggaatcattaaatccgtgtcgccgtcttcatatttcgctttgtaatcgtaaaagtcggttttcggcgtgatttcaccgacggcggaacatttcggttcgtcatttccgagtacgccgatttcgatttctctgccggcgattccttcttccaccacaattttccggtcatactcaaaagccagttcgaaggctttttcaagctcttcgcgatttcggcatttgctgattccgacgcttgacccgaggttcgccggtttgacgaagcacggatatcccagctcctcttcaacctgctgtaagcagctgtccggcgtctgtttccagtccttttttaagaaagcggcgtacttcgcctgcggaagccccgcttgagcgaacaaatgcttcatgatgactttatccatgccggctgatgatgcaagcactccgttgccgacataaggaacgttcagcaattccagcagtccctgaatggtgccgtcttcaccgttcggtccgtgcagaagcggaaatacgacatcgatctgcgccttttcgtcaggcgacgcttcaggaaacatttcccggttcaatgctgatagagcgaaactttcaccgttttgttccagctgaagcattttcacgttggaaaccggctcagtcagcagcgggcctctttgccattctcctttttcagtgatgtaaatcggatgtatatcaaacttctcagtattaagcgcttttgttacagctaatgctgtctgcagcgatacattgtgttcggctgactttccgccgtacaccaatcctagacttgttttcaatggatattcccccacaacaattcatctttactatcttatcactttcctcagaaaatgatctaattatttttgggcattctgaatatgaaagcatttgtatgtaattcctttttattttatattaaaatggcatggaaaaggagatgtgtcatatgaaaaaaatcagtacaacagaacaatttaatgaacttattcaatccgacaaggaaatcatcgtgaaatttttcgctgattggtgccctgactgcacgcgcatgaatatgttcatcggcgatattttggaagaatataatcaaaatgattggtatgagctgaacagagacgagctccctgagcttgccgacaaatatcaggtaatgggcataccgagccttctgatctttaaaaacggcgaaaagaaagcgcatcttcacagcgcaaacgcgaaaacgcccgaagaagtcacagagtttttatcacagcatatttaattcgtttcacgatctttgtttatgacttcaggctctacatgaacatggacatgagtcacatcatgttcatgttttattgcatattcgacttcatcggctacttcatggccttctttcacagacagtcccggatctaccgtaatgaccatttccacatgaaccgtgctccccaaataccttgctttcacatccttcagcctgctgacctcttttatttctttcactgtgtgtttatacggctccaaatctttcagatcaaacccgtccgttaatgagtgggaagcatctttgaagatgtcccatgccgtcttacagatgataattccgatcagaaaagcaatgaccggatcaatccacggcagatgaagccgggccgttaagacgcctatcaacgccccaatactgacataggcgtcagaacggctgtctttcgccgccgcatgaagcgcagaacttttaacccgatccgcaagacggctgttatatacatacatgccgtacatgacaatcgcgcttcctagcgccgtccatgccgcaatgaagctcggctcggcctccgttccgctgacaatcgcctttgctcctccgatcagcacttcaataccgaccgccatcataataaaagacgcaattaatgaagaaattgtttcagcccgataatgtccgtaggcatgatcactgtccgcggggcgctgggaaatccggagcccgatcagcacagccagtgatgcgacaatatccgtagcattatttaacccgtccgcactgagcgcttcggaatgataaataagaccgatcaccagtttgacggcggcaaggataaggtacgcggcgatattaagaatcgcgcctttttcgccccgttttaagtttgccgtttgatcattcatgtaaggactcctccattctcattcatagtatggatggaaaagcggaaaaatagcagctttgatctgaccaaatgcaatattcgacagcattattccccgggaaactatttgtcgaaaaattggcggtatttttcctttacatatgaatatgtccattgtataatttcattaactgataatgattctcaatatcaattgattaggagggtaatcatgaggtcttctcctcagctcagatcatcagttgaaggacgaaaaaaacatctgatccatttgctgatcaataacggaatatacaaaaagtcggaacggcatttatatgaattatcgctcggagaattagaaagcgaatacaaatatgtaaggaaggtgcgggctcatggcgaaacgtaaaataaaaacatacgaacagctgataaaagaaaacaaggcggccattatgaataatcaaaagctgatgaatgtgatctatgacagaattgaccgcaagcatcaaaaactgctccggcacaacagccatacataaaaagagcctttttcaggctcttttttttattgctcaaaggcttccgccgctaatttgccgatgaccgcatcgtccatcggcggattgtgaaggccggcccgggcatcccgataataccgctgaagcggattatttcgctccaggctttttgcgccggtgattctcattgctttgtcaacaacagaaaggacggcatttgtcacaatatgttttgccgcgccgagctcgcttttgatgaaagggcggcgtttcggatcatcatacatttgcgccgccgtgaagagaaactgtctcgcttttaacaattcaagctccatttccccgacacgctgctgaacggccggcacgtctttaatcggtccgttcaggctgttcggcgaatattcagatgcaaaccggacggcatagtcccttgccgcttgagcgatgcccagataagcagcgggaatgtgaagcagccagccattcactttcgccgctctcggcccgctgataagctccacaagccgctcgtcactgaccgtgacatgatctaaaaggagatcatggcttccggtcgccttcatggcaatcatatcccatgtttcttcgactgaaacgcctgcctgatctttatgaatgagaaaaacaccggtcgtttgtttttcttcaatccatgccgtcacaagcatataatccaaagtcagtgaaagggttgtaaaggtttttcggccgttcagcacccattttccgtcttttttgacagcggaagtgccgggtcttcctcccctcgtcggactgccggtctgccgttccgtcgctgccctgttcaggacggctccctttttcacctcttttgtgataaatgaaaagacaccttcatcccagctgtttccttctccgagctcacccatgacggataaatgccagccgattccgagagcgacggccgcgtctccccgcgccagccgttcctgaaacagcaccatctcataaacggaaatgcctgcaccgccgaatgcctcaggtaccgttaacgccgtatatcccgcgtcgcgcagtctttgaattttctccgcgggaaaacggcccgcctcatcatcaagcgcggctgttttttgaaattcgtctgcaagcaggccgattttttccatccattcccgctgccgttcattctgtatccataaagacactggaatccccccattataattccgataaagttaataagtattatagagattcaagtctcgtttcgcaactgtgaggctgtacaaaaaaacgcgctattccatagaatagcgcgttcagactgcttccgggccgcggtcctgcttgagcccgagataaatcagcatatatgtgagataacccatcgtcatcacaagcccgccaaagaaaaagcttgaaaaaatcggctcttcaaacgcggtaaccgccgcaagcacgatccagcttgcatacaggtagatgatgaaataacggaatcccgtcttcattttatataagagaaacagccccactgtagaaaacaaacccagcgcaagcctgaaataaacaagatgttcgaattgaaacatgaatgacacaaaggaaaaaccaagcaataacacaatcggtaatgcggtaataaaatttctcaagtgagcacctccgtcattacctttattataaatcaaaatagcataaattattgatttatcgtgatctttttcacaaaaatgtcattcctttactttatacccgaatatcgcgtttgcaaaagctccaccaagcgacggctaagaagaatacgatatggataatgataatgcctgcggaaaataacggcgtcattcccgcaaacagcggcttcgccccgctcatatattgcgtcaggtcagtatttgcgaacagcagaaaactaccccatttgttttggaagagcgacataatcgtcacaagtgattttgcgccgtacagcacgataaatgacaaaatgacggccgttgcgctgtttcggaatacagaagaacacaacaagccaaagcatgccatcgcaaacgcctcgacccagttcgtgccgattactttcagggtgttcacaagaagcgtccctgattcagatgtcaccgacactccgaagaaagccatgccgaacagcagagacagaatatagtacgccgcatacaggtacaagctgaccaaaaatacggtaatgagtttagatacaaaaatccgctcccgctttaccgggcggattaacaaaaatttgatcgttttcttatcaaattcagcggaaatgatcgttgccgcgatcacgatcgttaatgcctcaagcagaatattcagcccgggggcgtacgccatatagccgatgaaattctcatccgttccggaactgatgacaagccgtttaatgacaagcgccataataaattggagaacggccatcagaatcagcgccactaatgagacttttcggttaaagagtttcatatgctcattcgctgtcaatttaaacattcgtcttcccctcctcttgaagcgccgtcgtcactttcatgaattcatcctccagcgattccgcatacggcatgatggaatacacgagaaagtcttgtccgacgagcgcacggtttaatgccgggatgtccttcttcgctacggtgacggtaatgctcccgccgtttttctccggaacgaattgctgctgggacagccattcgaaggcttcgtcagccggctgaatgtcgaggatggctttttcttctttttccgcagcgccgcgcagaacaacctctgttttgatctcacctttttgaatgatgatgacacggtcgcaaaggtcctccacttcacgcaataaatgcgtcgcaaaaaggatgctcgtcccttcaagctccgcgagttcctttaagtgatcgcggaaatccttcattccgccgggatcaagcccgtttgtcggttcatctaaaatgagcagattcggacggtgaagaatggcctgtgcaatcccgagacgctgacgcatgccaagggaatacgttttaactttgtcatgaacggcatttgtgagcccgacccgctcgatgacttcctgaagcctgtcttctgtgatgtttttgtgcatgttggcaaagtgcttcagattttcccaccccgtcaggtacgggtagaattcaggattttccacgatcgctccgacggattcaagcgctttttcgaaatcagcatcgtgctgaaagccgttaattgtaatcgtgccgctgtttttctttaaaaggccgacgatgattcggataagtgtggtttttcccgacccgttcggaccgagcaaaccgatgatctcgccctgcctgacatccatgctgatgttttttaaaatgtgctttttgcctattgttttgtcaaggccttcaatatgtaaaatcggctcagtcatacagccttcctcctttttcacaaaaaataaacagtgcccgtacataggcactgtctgcattataacattagtcatatattcgtgaagagccggagccgtcgttatgtcttatccgggaccggtccgtttttttccttctcctcattattgacgacatccagaatatcaagcaggaacacaaaaatcggaattccgataatcaagccccaaatgccgaagaaatgttctgagaaaatcagaaccgtaaaggtaaaaaagatcggcagttccgtttttgctgacatcagtttcggattaaggaagtacgtctcaatcgcatgaatgacgaaaatgaccagcacgatgtagatgacgtacgcagcgccgcccgtcgtatacgcgatgatgctgagcggaatgagcgaaatcaccacacccgccacgggaatgagcccgaggaaaaagaccatgatggacaggccgaacagctgcggaaaatgcagaatcgccaatgcgatcaaggtgaggatacagttcaccagcgcgataataaattgggcttcaagcactttgccgaatgttctcgcaaatttgctgccgaaataagcaagttcgtagtaaaaaacagacagcttgctgtgctgaaattttttcataaactccgtgagccgctttttctcgaacaggaaaaacatgctgagaatcagtgacatcacgacctgcaaaccgaaagtgctgatatcggccaagtatgtatacagtacattaaaaccttcttttacataggaaccgatattgatatcgccgaacacgctcgatatctcatcataaaacggaatgacatcgggatgatacgcgatgtgcttgatctgcttaatcagctgttcaatctgcttggcaacaatcgggtaaaagacaaagcctccgacagtcgccccgacagccagcgcaatatataaaatggtgatgaccaccctctggctgatccggaaaaaatggttcaacacgtgccggatgacagtctccagccgatccatcagaaaagtaaaaataaacgtaagcaaaatcaaattaatcatacttcggaatacaactaacaccccagtcaaaacaagaaaaacggaaaaacgtctgacacccggatgctgaaaaaatttaaaaatagccgccatttatacactcctgctaggacaaaaagcccttagatttcatctttcactctctaattgtaaattatataacaaaatgacgctaaggtctttgtccacctcctaataaatttaaacaaatttatcttttttactcatggcggccgaaaaaaagaacggcatgccggatgcatgccgttcctttccttttataccgccgtttttatttcttttacggcctgtgtgcttttcgcttcgtcaaactcattttcgctcttggctacgatgatggtggcgattccgtttccgatcaggttgacgatcgcccttccttcactcataaagcggtcaacgccgaggagcagcgccagtccctccagcggaataacctgaagcgccgataaagtggaggcgagcacgataaatccgcttccggttacacccgccgcgccttttgatgtcagcatcagcacgagaatgatcgtaacctgctggccgatggtaagatcaacgccgaacacctgcgccagaaaaaccgtcgccatggacagatagatcgaggtgccgtccaggttaaaagaatatcccgtcggaatgacaaggccgacaaccgatttggaacagccgtaacgttccattttatccatcatccgcggaaggacggactcagaagagcttgtgccgagaacgatgagcagttcatctttaataaaacggagatagttccacaagctgaaaccgaatagtttgcaaatgatattcaaagcgacaaatacaaacaggaacatcgtaacgtatacagacagcatcagactcgccagcggcttgatggaatcaaggccgaagtgcccgatcgtataggccatggccccgaatgcgccgatcggcgccgcgcgcatgatgtagccgatgattttgaaaaaaacgtgcgacagtttatcaaagaaatcaataatgcttttgcctctttcaccgagcgccgccaggccgacaccgaataaaacagaaaagaataagacctgaagaatgtcgccttttgcgaaagcgtcaaccatatttgacggaacgatgtgagtgataaattcaatccagtcaatcccctgtcccccgttttgggtgtactgagagacatcccctttttcaagcttgctgtaatcaaggccctcaccgggtttcatgatattgacgaccagaagcccgataataagggcgatggtggtcacgacttcaaaataaataaatgcttttcccccgactttgccgacttttttcatgtctcccatcttggcgatgccaagcacgatcgtcaggaatatgatcggtgcgataatcatttttaccgcattgataaatgtatcgccgagcggcttcatctgcttcccggcctcaggccaaacgagtccgacaatgacgccgatgatcaccgccgtgatgacctgcaccgtaagatttttgaaaattttcatccctactcccccttgcctctcgatgcgtctatacaaagatgatagcgttttcatacgaagaggggaagcttatgatcataacggacattttggtctttttggtctcggctagcggacgaatttgtagcggttaaccggccgtcccactcccccgtattgaatgtcgagcttaatctggccgtccttctcaagaaaatcaagataacgccgcgccgtcacccttgcgattccgagcgctttggcggcttcttcagctgaaagcggctccgtctgctgtttcatataggtcaaaatttcattcatcgtaaaatggtttaaccccttcggcagatcccgggacggattttgcggaattttcagcagcatgtcaagctgctcttgcgacatcgtgtcatgctcttcaattttccgtttatattgtttatagttttcgagcgcctgtctcatccgctccagcttaaacggcttcaaaatatagtcggccgcaccgttttgcagcataagctggattgtttctttgtcttttgcggccgagacgatgatgacgtccacttcgagcttttgttttctgatttcctggagcgttttaattccgtcttttttcggcatgtatacgtctaataccacgagcccgggccgcagatcttttataagcctgattccctcgtctccgtcagcggccgtggcgatgacgctgaaccctgaaacaccggtgataaattctttattcacctcctgcaccatcggatcatcttcaataagcagcaccttgatgtccatcgaatgattcctcccccttcatcggaaataatatagaaaatgccgttccctgtccctgccgtgtgtcgacttcaatcacgcccatccctttgtcgacgatttgtttgacgaggtacaagccgtatcccgttcctcccgttttattgacggtaaaccctttgtcataaaggcgcgggatatgctgatcggaaatcccgcttccgttgtcttctattaatatagcaagcacttcatcattttgctcgatactgatgtcaatatgtttgtcctccgtgtccgctgtttcgaatgcgccgaacgcattttcaattaaattgccgagcaggacgacgatgtcatgctggtcgacatgctccggaaatgccgagaaactgctgttttcatcaattttcacagaaatgccaagctcttttcctcttttgattttgcttaacagcagccccgccgcggcgtcattctgaatggcctgatgaagaaaatcagtgacgctttcttgttctgatgattccttaaaagcaagccggagcgctttttctgattttccgagctgaatcagccccgcgatggtgtgaagcttgttcatatgttcatgattttggactctgagcgcatcgacaaaatttttcacacctgtcagttcttccgccattttcgccgcttccgtcctgtcctgaaaaatggcgacggctccgatgaccttctttttcatgacaatcggaattctgctgctcatgatcacctttccgctgacttggatttcttcattatatacggctcggttccgctcgacgatttcagggagccgcgaatcttttaacacgtcccagatcagcctgccgtcggtctcttgtctgacattgaatatctgcttcgctttttcattaaaaatggtgatgtgatgctgattatcgatcgcaatgacgccctcattcatcgagtgaaacgtagcggtccgttcctcatacattctcacgatctcatggggctcgagccaaaacatttgttttttgatgtggcgggccagcaaaaaggagccggccagtccgaacccgagcgccagcagaacgataaacagtatttcatgtttcagctgaagaagaatttcaccgaatccgggcagcgttttaccggcaaggacgacgccgatctgattcaaatcccggtctttgatgggataaaaagcgcggacggcggtgccgatctctccctttgcttcggaaaaataaatgtgctcggcgaacgccgcggcttcgtcctcaccccttgaacgctttccgatcattgtgctgacgggatgtgaatagcggatatgatccatatccatgacgacgatgtagtccgcttcattgatgatccttatttcttcgaccgcatggcgcacgtcttccctttgttttttctgctccagggcgcgtttgacatcggtcatctcagataccgtccgcgcggtattcatcagccgttttttcagctcgcgctcctctgtatgctggatattgccgaccagcacgatgccgacgatcaaaaaggtaaaaagcacgacgatataagaaagtatggtgattttccagcggatggtaagcttttttttcgtcattggcctcttcctttccgtctctttacgaaaacggcccgcccgattatgcttgttatagaaaatggcggagggggttttcgatgaaaagcttgctgacttgtctcagcctgatggtactcggtatcggaaccgctttattcatcggctttcatgatcgtttctcaacagaagaaccgtattatgatgacgaacaggaaggcctgaaagatcaaatggttttcaaattcagtcatgtcgtggctgaaaacacacctaaagggcgggcggcgaataaatttgccgacctggtctatcaaaagtccggcggtaccattaaagtagaggtatttccaaacgggagcctctattcagataatgaagaaataaacgccctccaaaacggggacgtgcaattcatcgctccctccacctcaaagctcggatcactgtctcccgaatggggtgttttggatctgccgtacgcgtttacaaactataaagccgtgcaagaaggcctcaacggcaaaatcggcacgcgcctgttcgcttctttagaaaagcatcatttgaaaggactggcgtactggacgaacgggtttaagcagctcacgtcaaataaagggccgatcttctctccggacgatttgaaaggacaggcgctcaggatcatgccgagcagcgtgatcgaagaccagtaccgcctgctcagcgcgcacccgcggcaggattcctttaattccacgtttcagctcttggaaagcaatctcgtagacggagaggaaaatacgatttcaaatatctattctaaaaaattttataatgttcaagattatttgacaatcagcaatcacgggtacctcggttatgccgtgatgaccgacgagcatttctggaattcacagacagaaaaaacgagaaccatcttaacggaggcgatgagagaaacgacggaatggaacgaagcctccgctgagaaaatgaataaagaccagcttgaagagataaagaagaattcatccattcatattcatgtgctgagcaaagcggaaaagaacacatggatgaaacgcctcgacccgatttacggacaatatgaacaggtgatcggccgcgggcttgtgcaggatttgttatccttgcgccgcgagccttagcaggaccaatacgcccatctccgtttcatcccttttcccgccggggaagtaaatagggacagagcaaaaaaggagatggagacatgtttacacatacgaaaaaactgcagcatccggctaaaccggatcgtcctgacccgctgttcgcaaaaaagatgcaggaaattttagggggacaatacggggaaatatccgtcgccatgcaatatttgttccaaggatggaatacacgaggcaatgaaaaatataaggatcttctgatggataccgcgacggaagaaatcggccatgtcgaaatgatcgcgacgatgattgcgagactgttagaagacgccccgctggcagagcaggaaaaagcggctgatgatccggtcatcgggtccattttaggcgggatgaacccgcatcatgccattgtctcaggactcggcgcaatgccggagagcagcacgggcgttccgtggagcgcaggctatatcgtcgcaagcggaaaccttctggcagacttccgcgccaatctgaacgccgaatcacaaggaaggcttcaagtcgcacgcctgtatgaaatgaccgatgataaaggcgtgaaagatatgctcagctttttattggcccgcgataccatgcatcaaaaccaatggcttgcggccattaaagaattagaagaacaggaaggtccgatcgttccttccacattcccgaaggcgctggaaaaacagtcattctcccataagcttattcatttctcagatggagcagaaagcgctgaacaaaattggctgaaggaaacagcgccggacggagaaccatttgaatacgaaaaggaaccgaaagcgcacggcgaaatagctaagctggaccccgtcccgccgtatgtccacaacacgcttcccggacgaaaataaaaaagcctctaaaggggctttttttatgtgcgcacaactgtccagtccggttcgtaccggatgtcggggtgatgtaacagctcgtgaatgacaggttcatccccctcgtacagcatcacttctattgaaagaatcgcagccttctgctcgttttcttcgtatatgcggtcatgttcgttctccataaaatcatcataggcctgtctgtcctcccaaacgctgatgatctctgcgatgaacaggccgtctgcgtttttccgccagccgcctgcctgtctgacgaagccatttacacatgataatgctccccaccttgactgtgcttgcgcaaatgcttcagcgtttgcagcgtctgtttcacatacaatctttttgatcagcatgaccgttcctctgtgatgactgttttcgcatgcgtatgctcgacacagagattcacggttctgacgtaagagcgggtgcggtgaatcgtgcctttcgggatgagcaggctgtcatttgctttgagcactgcggtttctttgtccttaaaatcgatcagcagctcaccttccagaacgatgaaccattcatctgagtcagggtgatggtgccagtcatattctcccgtaaacactgcgaggcgcacacagtggtcattgatctccgcgattgaaaaattgtcgtgtttttctttgactttatggcgatagcgagcaaattcagcatgtcagacacgagtgaaaaacccctttttcattttattgtatcggttttgcggctcagatcaagattttcccaaaatcaaaagcgatccggctgatgtgccggatcgcttttgatctgcaggttgtctgccttttatgcttttattagctgcttcgtctgtttccgcctttttggccgatttctttataaaactctttgtcatgatttttacttgtagcttctccgcctttttggccgatttcctgatagaattccttgtcatggttattgcttgtggcttctccgcctttttcaccgatttcctgatagaattctttgtcgtgatttttgcttgtggcttctccgcctttttcaccgatttcctgatagaattctttgtcgtgatttttgcttgtggcttctccgcctttttgaccaatttcctgatagaattctttgtcatggttattgcttgtagcttctccgccttttttacctgcttcttctctgctcattttgttattatcttgtgccatttttgaattcctcctttaattggtgttggttgttggtttcccgatttcagaactgataaacaaagaaaacacattgaatgtgttttcgggtggttttttatcattctgtatcgttcatgcgttttagaatccggcgttttttataaagcatgatgcctgtttccgcgatgctttctaaagctgaacggttggcggacgcgccgaagatgatgcctgcggccggaaccatttgcagcagttttttcgcggcgaacgtatcgcggtagctgtaaacgacttcccgccagccttggatttgcgaggcgacgcgctgataggtttggtcgttttgatcatattgccgtaaatcttgcaggatcgctttttttccgatgacgtcactggatgcaagctgaagcaatttgacgataaacacgcgttcttttttgtctttcggatcaaagccgtaagcaaccgcgatatcttgcagcgtctttaaggacaggccgagcatcgccggaatgtctgccgcaagcgtaaacacgccgccgactcccgttgcggctccctgcaccgtcgcggcctttacgcttgtacgcgctatggcttctgcgatttcgtccatgacggcaagcggcgcattgcggatgtcgtgaagcgtttgacatgtaccgtgcggcagccgtttttgaaactttttcatgatgcgcttttctgatgtaaggtactgtccgcctgactgaataaacgttcccgtttcatcgagaatgagtccgattttcctctgaataaattgcggtgtcagcttgtccaaaagctgaaacggcaagcgggtgaatgtttgccagaacatcgccctctgctgcgccttttcccatttttgaatgtctctcagttgtctttccaggtctgtccgctcttctgtcacccgtcctgcacgtcctttctgatttctttctacatagtatacctttatggcgttttctttttacacccggccggactttttatccggaaaacattccattgattaattttcttcaaattctatatattttataattttgaataatacgattgaaggagaatgctgtatgcaatggatttatttaagtttagcgatcatttttgaagtattgggtacgatcagcatgaaattatcaaatggatttacaaaacttgttccaagtattttattgttattgttttatatcggcagcctttgttttcttactttgactttgaaatatataagtgtctccatcgcgtatgcggtctggtcgggaatggggatcgtactgatttccgcgatcggaatttttttctttcatgaacagttctctgttataaaagctgtctctgttcttctgatcatcatcggtgtcgtttccttaaactttatttccgaaagtgaaacgtcatcaaacggcatcagcgttcatacggacagaaacaggtgatgaaagggttaaaggttctcttcctcattacagatattggatttatcatttattggattgttactttttttgagtagattccaaaaaacatggcgtttaaagattatgataacgccatgataatggcctggaactggtcattctttcccctagatattttcatttcattgaccgggctgtacagcttgtttctttataaacggaaacattcgttatggcgccatttcgcattaatatcacttgtgctgaccttttgttcaggcctgcaagcgattgccttttgggtatttatcggtgattttgatctcatgtggtgggcattcaatctgtacttgcttctttatcctttatattttattcggaaattgctggtctctcgtaaaaatagctgtcattctttttgatgaggcggttttctttttcttcaggcgggaaacacttttcataaaggagtgatagacatgccttggtctatgaaggattatccgcaatcattgaagaatctcgaggaacctgtgaagaaaaaagcgatcgaaatcgcgaatgcgatggtagatgagggttatgaagaaggacgggctattcccattgcgacaagtcaggcgaaagagtggaaaaaaaacgcttctaaagaagaaatcgatcagctgatgaaacacgatgatgaaacgaaacgcggaaattgaatcggaatatagaaaaaccccgctctcaagagaacgaggtttttctgcttataaaccgtaataataagatagtgtggtgactgaaacgtagcctgtcgctcctgcatacgtgactttcagccatttattggaattggtgtagtggccttgaacatattctccggtgacccaagaacctgtaatttttttaccgcttgagaatgttgtgatcgttgaacagctgaccttagagcatgagcgcatattagcaccgtaaataccgactgtgcccccgctggctaaaatggaaacgtccggttcagctttaggtttgaaagctgctgctgatgcagagccgccaaaagcgaataaagaaacagcaaaaatcatggctaaagaaatgatcgacaaacgacgtaccaagaaaattccccctcttttatcatatggccggaaagctttcctgacgttattatacttttttgcccggaagactgaaataagtctaatgctccaacttcttttcttcgcaagtgaccatgccgattctttttttgatagataacagccgtttattggactggaatcactgatatatcgttgattcaaacgtttattcagagcggccggagtttttccggaggtcatttgaatggtacagaaaggttttatcttccaatggaaagaaacattattattctatttacccgggaaacggaggaaatactgcgtctttttctcaggatcagttgcaccggacagaaagttgtgaagtgatatgagcaagtgttctcttttcacctttttaaaagaacgctcaacgcatccgcgcatgatcggacgcggaaacatgctttgcgaacggcatcgcttctttcccggaacgatgccgttttcattttcggacctttcttcggcgggatacatatcatagataaaacagggcatcaatgtaccggtttattgaacataaagaacttgacatctcataaaagcggatttatgatgtagataaaataatttgcatctaggaaactttttgttatttagctaaaaatctatcggaatttaggtgagacataatgagcaaagacatctcagcacaatcactgcaagcaaaagccgtgcaggatgcacttgacggcaaaagcaagggattcaagcggcttctgcctttcttaggcccagcctttatcgcggcgattgcctacattgatccgggaaacttcgctacgaatatctcagctggttcgaaatttgggtatatgctgctgtgggtcatcctcttttcaaacttgatggcttttttaatccaagttctttccgcgaagctcggcattgccacgggtaaaaaccttccggaaatcgccagagaccggtatccgaaatgggtatccgccgggctgtggatacagggtgaactggtgattatggcaactgacctggcagaatttatcggggcggcgctcgggctcaacctgctgttcggcataccgatggttgaagcggccattatcgcggcgatcggatcattcgcgattttagagctgcagcgccggggttaccgggcgctggaagcgggcatcgccggacttctgtttgtcgtggtgatcgccttcgctctgcagaccttctttgccaaacctgacgccggctctgttctcgaagggctgtttatcccgaaaattgacggaatggacagtgtgctcttggcaaccgggatactcggcgcaaccgtgatgccgcatgccatttacttacattccgcactgacacagcgccgtgtcgtcggaaaaacggataatgagcggaaaaagatttttagattcgagacgattgacattctcatcgcgatggtgatcgccggggcgattaacgcaagcatgctcatcgtcgccgccgcgcttttcttcaagaacgggctgtatgtagaagatttagacgtggcttatcagcaattcggccactatatcggaccggcttcagccattctcttcgggatcgggctgctggccgcagggctttcaagctcttctgtcggcacattgtcaggcgatattatcatgcagggcttcatccgttaccgtatcccgctttatttgcggcgtttcattaccatcattccgccgatgatcatcattatctcgggggtcaacgccacagaagcgctcgtatggagccaggtcgttctttcattcggcatctcctttgcgctcgtgccgctgattatgtttacaagcaacaaacgcctgatgggcgccctgacgaaccgaaaatgggtgacggctctcgcctggctgattgcggttttggtgatcgcgcttaatctgtttgtgatctacgattcattccgttagaaaaaaaccggccgtagcggccggtttttcttttgacgccggatgccgttcgtatctttttccgggcgtttttggtatgatagaagaaaaatcggagttttgcttatgtcagtatttatccttttttatctgtggattgtgccgattgtcatcggtatcttctgttctctttttgcttatcggacaacgggtaagaaacgtctgattcccggctttgtgatgatcgcattaagtatcgtttccttaatcacggggctttggatcggcggggtgaactatcatgtgttcatcggaggcatgtttttattcggtacgtttttggccggttccgccttcccgtttttcttcgctctctcacgcaaacgaaaataaacaggcatgccgcctgtttattttttttacctaagcctgcattataaaaaccgctccgataatgtgattccgcctcaatcagcctatacatgcaggctccagcccatgttcatttcacgaaactgcagctaaaataaatcctgccaaaaaaaaattttgaattgcgagaaaaatatcgtattaaaatcctatttacccaaaaaatacctattgatagaatggtatctgagagggaaaaatgttcaaagcggatcatacaggtcccgcctaaatacatagtctttcatttctctctacactacatttctaaaggaggatttcccattagacacgcagctaaaggcattctgtttgccgcatctttagcccttgtaactactgcttttgtccccgcatccttagctaaagaaaatcatcataatactgccaatgccactggaacgacaaaatcatttttttatcagactgatacgcaattttcctacggacttaaagcacaaagcgatgcatctgtgtcaaaaccagtcaaagatgtaatcagagaagtgctgaaaaataaaacaaaattattcaatcttgttgaaaaattagcaggaaagaaaataagaaatgaactcgaatccgttttcaatgaacacatcgaaccggttttaaagaaaatgctgaacgagtatgtcgccttaagctggactgacgtggaaaagaatctttatctttcacttaaaaagtccggactttctgacagccaggctaaaaacctcgctcatttgacaactttagcaatgaaagcattttaaaatcattcataaatgatcgtcaggaaaatacgtataaagtaatgcaaagtgctgttagattcactctaatagcactttttcattggagatgtcacatgactgtcttttttactgttttgctcactttcttatgctgccttgtgatttcatctcttatttttatgattctattaaaaaaagagatcgtggatacaccgccaaaccgcttagctcatgcagcattcatcatacttattggattctccctgttcttcgctgtgactgtccccagcctgattatttgttttgcagctgtaacaatacatcattttttcggagagtatatcatctatggttcactttcagacttatacatattttctgtcgtcgtcagtatcttagctttagtttatatgctaatccttacggcaattgtaaaaggaatgactcatgtttttacattacctgcttggtcagcctatatccttgaattcatttttgcatgggctgctgtttacttctcaatccaatacgtttccaatcatatcattgagaacatatctatatttcaaggtggagaaattcttctttcattgttcatcactttcttattttcgggattggatatcctttttactaatttggataagatcacaaaagagaaattaggctaagggggtaacaaatatgaggatcatgacatatatatcttatttttctatttctttagttttgcaggtggtatggctgctattaataaaagatactcctaatatatttctgatagatatgattacggtgtccttcttattcactctctttatgttcatcttggatcaaatgttcaaaaaaaagcggacaaattagggtctgtttttaataatcctcgggcttctctttcgttttgaaattgttccggatctggggatgttgcggcgaaccgttcattaatgtttaacaccagcctcggtaaaatacttctccttttatataacatcctgacttttccgtcatatattcaaacgaaaaaacggcaaaaaggagtaatgaaacatgatattgtttattggcaagttcatgttgctctttttattctgttcgctggcatattatttgtttaaagttgtttattacaatatagggaagaacattgcgcttaaaactccgaaagggacaaagacgaaccggacggcacatgtgtttgtcaaaaatggaactaaactgaatgatggagattactttatgatcgctgttgtgaccgctctctggctgttcttcagatgaaaccgcgctgatccatcacgagttttttgatcagccatcgctcgccagctgccgattttcacaatcatcgttttcgtttaggacgactatatgcaagcaagccgctcaacaaacaaaggagctgtcgagatcttctcgatagctcttttgtttgtccttgaatgattgaagataggcttaaaaatggacggcgtctttctcatgcatgcatcgttcaagaaaacacttcacagcaaaacggaaaggtgaacgcaatacaagtaacggttaagaaccttatgaggcagcgtatgttgattactggataagaaaaagaaatcccccagtcttaaaaggtggaggtcaaaaattggagaacacttaaatatttatagctttttcagcgatataaaaagttccagagtcactcatttcagcagtataaacatttgtcacacttaataatccagtaaaaagaataccgattaaagcggagctgattataagtttcttcattatatagcctccgtaaccttaagtatttgtgtttgggcatgtatggttttctttaaaaagtttcttccctctgcatagtttctcttctcaaaatgaaagtcacctaatttttcggttagctctgcgaaatcagaccaaaggcgtttctcttccaagtaacctaagctttgtttcacttctgtttcattatattcttcgtacaatgaattaatgatttttaatttagccaaatattcctcttcattagaagtccgagcacgatttaaagccgtttcataaaagaaacgtgcttccttggctttatcacattggtacaggacattcgccatcatatataatgatctcactccatacactgtatcaatatgttctttcacgtctattgcctttttgaaattctcttcagcagcaatcaaatttttccctcttaaataaactaagcctgagttatgaaagatcactccgataattcttttcactttttcctcatccaagccacgggcgttacttaatgcttcccgataatatgattctgcctccgtcagcctgtacatatcgtacatgttagcaccgaccatcatattacagccaatcactttcactttgtataattgatttttttcaaacaattgcttggctttttttaaatgattgagggaaacaaagtgctgatcaatttgataataggcatcagctattttgtaatgaaattcagcttgctccatttcatctgatacagcattcaactctctctctgctttgcgataatagcttatcgcatcaacatactctttatgatcaaattcatacattccacgaaaaaataatgagtaatacttcaagaggcctgtaagtcttttttgcggcttttctattttttcaagtagttcgtcgactgtggggcgatctcgatatctgtcttccggctccaaggaatctaacatcaattggtgacgaaagcacatcaatgaataaaaaacaagcaaatcctgatcctcttccatctcctctatttcctgttcgacctcagcctttaaaatctcagcatcaggcacactgaactggcgaatcattttgtaccattcattgatcttgacaccaacttgggacgacggtaaaacttgatccatatatacctctccctctaattgctatttttgtaatattataactatttgaacataaagtgaaaacgaaaaaaaaccgcaatttacttttgcgtcatactcacctgattaacttgttttaagacacagggaaattatacctcaacataaaaatactgtataaaaatactatttacccaaaaaatacctattgatagaatggtttctgaaggaggtggaaaaatattcaaagagaataatataggactatcctaaatacatagtctttcatttcgctggcagattacattcctaaaggaggatttttcattaaacacgtagctaacggtattctattcgccacatctttagcccttgtaactgcttcttttgtccccacatcctgagctgaagaaaaccgagataccactactaatgccactggaattaccaaaccaattttttataataattgataagccgttttccttttagcttaaactggttttaaagaagctattaaacgaatatgttgccttgagttgtattgacgtggagagaatctttatctttcacttaaaaagtctggactttctgacaaggctaaaagcctcgctcattggacaacgttagcgatgaaacattttattgttattcataaattattaggaggaaaatatatatgaagaagaaagtaatccctgtagttttaagcgcaactctacttacatcattcttgggtacttcaggtgctttagcagctgaaaacagaaccacaactcctgtaccggtaacgaaaactgcaccaggtactattccaactggaatgcctggcactattccaaccaaagcggctctcaatggtgactaccaaacccaaggtgtagtttcgtggtcctataaggctttcagagctgcctgccgttcaggtggatggcttttatcaaaagccttaaagccattctcccctaaagctgcggcatggattagaaaaaactctaagaaggttgccgacattatggataaaggtgaaaattggggtgtaaaacaatttacaaaagcttttaaagctatcggagctcctacagatgtagctaccactttagctaaattcattgttgctttgatttaacatatttaaaatttaaagtgctgttagattcactctaatagcactttttcattggaggttaacatggctatctttattaccgtattgctcaccatactatgctgtcttgttatttcatctcttatttttatgattctattaaaaaaggagattgtggatacaccacccaaccacttagctcatatagcattcatagggcttattggattctccctgttcttcgctataactgtacctagcctaggtatttattttgtagctataactgtaaatcattttttcggagagtatatcatctatggttcactttcagacttatacatattttctgttgtcgtaagtattttagctttaatttatatgctaatccttatggcaattgtaaaaggaattactcatatttttaaattacctgcttggttagcctatatacttgaattcatttttgcatgggctgctgtttacttctcaattaaatatgtttccagtaatttcattgaaaacatatctatatttcaaggtggagaaattcttctttcattcttcataactttcttattttcgggcctggatatactttttactaatttggataagatctcaaaagagaaattaggctaataaaaagaaaagcaggcaatttagagcctgcttttttattccctttttaacatttctccaagccttgctttcgttttcggcccgtaaatgccgtcagcaggcagtccatacatggactggaaccgtttgactgcatttgctgtcttcggtccgtaatagccatctattccgttgttctttgcccctttgtccggataataatagagagccgccaaagctgtctggatctgtttcacggccgttcccttagttaaggggcttgtcactttaaaaacgcccgatggcagcgtgtaagatgattttttgccttttgttggagagctggccgagtccgtcagctttaatacttggccgactttgataaaattcgggcccttgatactgttcaatctctggatggtggccatgtttacggcagttttctgtgcaattacagggaggacatctcccttcttgacggtgtacgtcgccacgccagtctttgttcctgtttttgctgataagggctgtgcgatgctaatgagcgaaccacgtttgttatgaactgtcctggccctccaaaagcttttttatcagccatcgcttgctagctgcagattttacgattttctttaccgtttccgcagattttaatacgatatactttcggttacggttcccgtcctctaagcttccaagcgggtcaaactgctgaccacttccttaccatggaagggggtcagtaaagaaataatcatcaataagaaagcctaaaaaaattaacaggcatgctgcctgttaatttttttataaccaccggcttcttaaaacagccgttttaagcttttcttgagtgacggcatttcgattttttggttttcaaagaagtttttcagcatgtatttgctgaagcccttcgcttggccgtaagtgatttttcccggaagcggcggctcgtcgccgatgacggcgtcgatgacgaccggctcatttgagttgagcgcttcatgaaaagcgggagccaattcctcgtgtttcgtcactttgatgccttttgccccgcagctttctgcaaaggcggcgtaatccatattttgcagctgggtgacgtagtcaatgttgcctttgacccgctgttcatattcaatcatgcctaaattttcgttgtttaatatgacaaccgtaatcggcagtttatatttaacagccgtcggcagatcctgcatcaccattgaaaatccgccgtctccgcaaatggcgatggactgccgatcaggttcggcaaggcttgcggcaatcgctcccggaagcccgcatcccattgtggcgagccagcttgagacgataaagtcctgcttcttcattttaaaatggcgggccatccacactgtaaccgttccgacatccactgacaggacggcgtcctctgcggccgcatcctgaagccgggcaatgacctgctgcggcttgagcggatgagtcgcttcggtttcatccttttcgatttccttccaccaatgcttcatgtgctcggtgcaggcgtccaaaaatcttctgtcttctttatattcaatgtattccgtcagctctttcagccccagagccgcatcactgacgattcccgcattgacgggatagcgcttgccgattttcgccggatccgaatcaagctgaatggcgggcgtatcatccgggagataatccctgtacgggaacgatgtgccgagcatgatcagcagatcgcattcctccatggcttcgtaggcgggctttgtgccgatttgcccgagattcccgagaaagtggggatggctgtcaggcacgacgccttttgccggaagagtaatcacaatcggagcggccgctttatcggcgaatgcgagcagctcctcttttgccgattttaacccttggccggcaagaatgaccggtttttttgcgttgttaatatattgcgcgcatgtgacgagatgttcttttttcggctctatatcggctttgaggtatatcggcgatgtgtaaaccggctcccgtttgattttttgcgcgaataaatcatcagaaacggttaaaacggcaacgccttttttgctgtaagccgtgcggatcgcctgattcagaagatcgggcagcgcttctgccgtatgtacctgctggttgaataccgccacgtcctcaaacatctgctctaatttgatttcctgaaagctgtcacggccgatttcatcggaagccacctgtcccgcaatcgccagcaccggaacgccgtccgctttggcgtcgtataaaccgttcagcagatgaacggcccccggtcctgcgattgaaaggcagacaccgatctgcccggtcagttttgcctcagccgcggcagccagggctgcgacttcttcgtgccgggtttggatgaatgtcaggttatttcgttcatgtctcagttcttcgataaattcattaatgctgtctccgggaatgccgtatatatgaccgactccccattgttcaagcagctccgtcattacgtgtcctgctgttttacttggcatactgcatcctccttttacctgtattcatccctttttcatacgggttgaaacacgggctatactctcagcttttttctcagcagatcaaggatggataacagatttcggtctttaaggactgccttacgatttgccgccccattgagtccgtcttttatttgccgttttctgttcggcaccatgaacagcggcagccggttttgggaaaaccagcgtaaatcggcggtttccgatccgttcatcagcggtgttcctccggtaatggctccgatgaaaacgtgctgtgtatcttcaaatgccggcctttcatactcaccggatttttgcaggatggtcacgttataccctgtttcttcaaaggcctctctgacggctgcggcttcagatgtttcaccttcttcaatcccgcccccgggcaaatcccatagtggaacgtcttttcgttttacgagcaatatgtcccgcccatcattttgtatgatgacaaaagcgccttgtgccatgtcgtcctcctttacaaaaaagaccgcggcatttcagcctgcggtctttccgttactttttaaaatgatacggcagggtggcgacgatgatgtccttcttccaaaacagccggacgcggagcaagaaggctgattggttgtgaaggatggtctgccagcgttttttcgtaataaattgcggaaacagcaccatcacggagaactgttcttttttcgctttttgttcgaccgtttccaaaaacttatcaaacgggtgaaccagactgcggtatgaggaatgcagggtgacgaggcggacgccgttatgaagctcttcccagcgcttttccacctttttttcgtgttctctgtcaaaggaaacatgaaccgcaatgacctgatccgataatgatttcgcatactgaatcgatttttggacgacggtggtgacaccggcgacaggcacgatgacgacggttcccttgatttcctcaggctgctgatcaacgacccgcagctgttcgccgaccgcggtgtagtgatttttaatgacgaaaaacagcatgacgacagcaggcatgaataacagcaccggccagacaagattgaacttcgtcgcgaataaaatacacagcaccataaatgaaatggcggcgccgcatgagttgatcagcatttttaccgcccagcccttcggcttctgcctgatccacttgatgcacattcccgtctgcgacagcgtaaacggaatgaacacgccgacggcataaagcggaattaaatgttccgtgcggccgccgaataaaagaatgagcaggatggacgcgataccgagaaagatgattccgtttgaaaatcctaatcggtcgcctcgtaccgtaaacattctcggcatatactgatcgcgcgctaaattaaacgccagctgcggaaaagcggaaaagcccgtatttgccgcaagcacaagaatcagggatgtcacgccttgaatgaaatagtacaccgtatggcgtccgaaggtttccgcggcgatttgtgaaataacggtctcgttaggcttcggacccgtgccgtagccgtacgccagcaccgtaatccccgtaaataagatcgccagcagaatccccatcatggccaaagtgcgggccgcgtttttcgccggaggatttttaaaggccgggatcgcgtttgaaatggcttccacaccggtcagtgccgagcagccggatgaaaaggccttcagcagcaaaaacagcgtgatgcccgctacgggcgtgccgatcggtgtatgctcggccggatgaacctggcccgtcatgagcttaaacagaccgacgacgatcaaaaggacaagcgccgccacaaacagatagacgggatacgccaaaatggacgccgattctgacagccctctcaaatttaaaatcataatcagaatcacaagcaaaacagcaatgagcaaatgatacgggtgcagggccggaaatgccgatgtaatcgcgtcagttccggcagaaatgcttaccgccaccgtcagaatataatcaacaagcaatgagccgcccgcaatcaggccgggcttctcaccaagattttctttagaaaccatataagcgcctccgccttgcggataagcgtaaataatctgtctgtaggacagaatcaaagcaagcagcaaaatgagaacacccgctgcgatcggaatggaataccaaaacgcggccgcgcttaccgcagccaaaatgatcagaatctgttccgttccgtaagcaactgatgacagcgcgtctgaagaaagcatggcgagcgccttgagtttcgtgagtttctgctctccggccgcctgtgatttcagcggtttcccaatcaaaaatcttttgattgaatggtacattttttgtcttcccctttttttcattttccgtttgatttacaaacccttactgctatgatgtctctgaataacgattgcatgccatatttcggcacagcaaaaagacacagaggcaaacggatgcccctgcgccataatcgtgcacaggtttcattcatctcctctcatgaacgcttacgaggttagctgtcggattcgggctgatgagagttggccctacctgaaaaaggattcaccccaagcggcatgacgcgccgcaaattggttcccccgctctgattacagattaagcgatatagattataaaagagatcatactcccgtcccgttcagttgtaaaggggcttttatgctgtttcaaaaataaaaaatcaccgccaaaaatggaaataaaaatacaaaaaagaggcctgttaacggcctctttttccttcattactcttcacttttttcattatccgcttttcttttttccttcttgccgtcagccagatcagaccggccgcaataattataagcgccgcgaaaacagcgatatacgtgacgttcagtgctgcggaacggcttttcgtatcaggcgccggactgctgtcgtcggatttgatttgctgatggtttgaaaacagctgcttgccggccgtttcgttgacgacggttgcggcatcgcttgtgctgtctaaaaagctgatcagctcttttgtgacagacgcgccgctgcctgataacggagcaaaaacagcgatgcttcggccggagtcccaaggtgattcctgggtaaacgcgacttgtttcgttgtctcattcagcatctgaaacgaagaaacatcgtacgcgccgctgcggtctgacggcacgagaagcttagaggcgtttgatttcaaaagcggaatttgcggcaggcctccgataaacacaacattccggcctttggcatccgcttccttcatgtctgatgccgtctttacggtaaagccgtttccgaatgaatccgccaccagagaaagttctttcagtgtctgtatgtttacgtcatccgggatgacgatcactgttttctctttcacgccgcccgcaaacgggagcggccattgcccgaaatccgctttctgcgccgcatcacttaccggatacgtcagcatgctgcttttatcaatatagacccatttattttcgtcacggtcaatacacgggttgttatgtttcaaacctgatgtgacaaattgcagatcaatgtacctgctgcttcgcaaaagcttcggatcaatcgggattgagacgtggtaaaagccatctttatcttgattgccgagatcatcaaggcgcaccgcattcggctgtccgttgatcatgacgttcagctccgctctctcggcgtcattagctgaatccgccttcgtccggatcgattccgacgtctttaatgtaagtgaaagcttgaccttaccgtctttatcaacagcggccgccgcagggtaaaagaagtgctctgacgccgttttgtttgatccgaccgttacatttcccgcgccgaagtcctctaatgtcagtttattgcctgtcttttccgcagcgggctgaaggcggccgattgtcaaagtatctccgcccagctggcttgaataagcgctgtctgtgatgacgcggattttatccgccagcgttttgtctgagtgcgccgtgacaaacaggacgggctgccgtttgtcccctgatgtcagaacccgttcggcgagaaggagtttgttgtcttccgctttgaagttcccccgttcgaaaagctcttttattttcccgttccaatgctgatcagcgccgatgacaattgacggattgctgattttgccggcatcggattcttttacataggataccttcagcctgctgtctgccgttttcagaaatccttctgttttgactgcggcttcagcttccgccgaggtcggtttgtcaggaaggataatatcggtttcttcacccgtattgcctgattgggcaaacggatacgggaaatggccgagatccgctccctttgacttgcttgcttctgaaagcacaaggcggctgtccggataaatttttatccagttgcctgacgtatcctgcctgacgcagacgccctcttttaatacgccgtaaaatcgtaatgatacattgtgatagccttgggcggattggcttttgctgagattgagcttcaccgttttccgcttggagctgccgtcaagctttatggatttgacgggttcatcatcaatggcgatggttaaagaagacggggcaattaataagtttgacgcctcgtaatcaatcagaagcgactgatcggcattcgaagctcccgcaggaatctgataggtcagctctgagctgtctttcgccccgtacagtgtcatcagatcgccagtcagcgcctgctgctcttttgcgccggcgcttgttccgagagcggaaccgtccgttttcagctcccgggccgcggccgcctgcccgttatacatcaatagcaaaaggccagttatcaatatcgcttttttcaaaaaggtcacccgcttttattttgattgtatcgctccgttttgtaccacttgacttcctgcttgaacaatcggtgcttgatctctgtgaataatgaccagatgacgagcacgatccaagcctgagagtatgtaaagtacatcagaaatacgataaagaagttttgtttgttcatttctgttttttcaatgcttaaagtaatcatgacctcagtcataaacaggaaaaaggccagtatccacaaaatcatcgccaaaaacccgactgtcagatgcaggtcgtaaaaaagattgatgataaaaatcgtgtttgacatgatcacaccgaagaaaaacaaaaaatacgtaaaaaagaaataaaacagatcgaagatgatccgcttgcgtttcagcttgaaaaattgggataaaaacttaagaacgacgtactggttgccgcgcgcccatcttgtccgctgacgccaccagaccttccatgtctcaggctcctgctcccatgtcacagccgccgggaaaaagcggatatgatagccgagattatacacgcggatggtcagctcggtatcctccgccagcgccttatcatcccagccgccgagctgttcgataatgctccgcctgatcgcgaagttcgttcccgggatggtggcgattttgaaccatttccatctgccgccctgcgccatccactgaaaacagatggtttcaatattgataaacttcgtcaggatcgttttcgccgcattgataacacggaatttcccgacaaccgctcccgctttctcatcattcatcagaccgagaaccaggtagtacaccgccattttttccggcgtattgtccgcatcatacacgcagatcacgtctccgttcgattccgcgaaccctgagttcagcgccgaagattttccttttccggcgttcggggctttgtgatgaccattttaatgaagtcatactgacgggaaaattcattgacgatgtctcccgtccggtcggaggaattatcattaacgacaatgatctcaagcctgtctttcggataatacaggttcaccatcgccttcagcgtctgcctgatgacgacctcctcgttatgcgcggggatgagcacgctgaccttcgggagctcccccatctttgcgcgccatttcggaatgttccgttcgaaggtcatataatgcctgaatccgccctgcatcagaaacatgtgatagagaagcatcacccatattaaacttaatgagataaaaaacagaatgttactcaaggcttcttctctccttaaagattcgtttttttaatgtggcgcgcaaataaaggacgtagcaggcgaacatgatgataaacaataacaccacgccggagagaatccaaagcgctttttcaagaggcgtctgctggtgatgattgaaaaaggccgttaccggatgaatcttgttttccacatgaatggttccgtctccgtccgttttgatcctgacgctgtccgacgttaccgtttgcttcgttttcttcagatcgagccactcgccgccgggaatccgctccatctgattgacgagctcgggaaggtatttcatgccgagatacggatggtagaaaccgcccgccgttccgccgccgaaatcaatcatctgagaaatatgattctccatatctccgagcggattttcctttgagttatcggcataaccgattgtttcagggtacagcgtcatcccgtccagcatagccggctttgagacgaacggaggggcgcccgaggttttccacgtcgcgccgctgagctgcacttgtccgaaaatgctggagaaataagaagatgcgattttgtagccttcttcagacatcgtgtagtgcggcgcttcgaatgacagcgggtaaaggccgagctctgtcagatcgtcaatcgcctgctccagcttcgttctcgtgtagatgttttctttttcacggaaaggcttcacatacgcccggtacgctttttcattcggaaaatcctgttccttttcaagcttgaccggagtatcatccgcattttctgacgtaatcggctgatccgctttggcatcccaaaattcaaagccttctcccgtttcgctgtatcggtatgcgtgcgtgtagccgtgaataatgatgctaccgcccatttgctgaagttttttcaggacgctgaccatttttggcttgtccgccaggtatactttttctccgttttccggattgagatagaccggaatgaccgccagaataaacggaatgtgtcttttatgcaggtaagcgcccgcttcgtaaagcaatctttcatctgacatcggactgatgtcttcaagccgcaaataaaggagggtgccgccctctgattctccgaatgcgctgcgcatcgctttcgccgtcagaaacgaatcatttaacaggctcgtcacaccgaaataatagtcagagcgcgccgttttccacataaaagggcgggtgctgccgtcaccggaccggtatgtataaagggactttccttttactcccgatacgccgagcacggacacccccttttcaagcggcatgtctgttttttcttttttgccgtaaatgcggtataccgtttctttttctgtcagggacaaccccgcaaattggcggaactgtccggcgttatagccgatgctgataagctgctgcggcatgctgctgatcagtgacacaaatgatgtgctgagcttttttttcgtgacgccgtaatagatgacgcgccgattctttttgaagtccgcggctgtgatgtctccgtcgcttttcacggtgacggcggatgagaaatggcccgcggtcagatcaagcattttgacctcagcggtttctttgccgtccgtgcttgtataaataatgagaatgccgtcctttttgtcttttgcttccgccggacggggaacataaaccgccgaaatcatgaaaagcgccgagagtaagagacgtatccatttagagttcattcatcatcatctcgttttccagttcatttaaaaattgctcggccgtttgtaaatcctttcggtacgccaagtaacatacacggaaggtgatggagacgtatttaccgttttgcagccggtacgtatccaattcctttttcagcttcgccagaacggccggcatgttttcttcaggcgtatgggtcagcacgatgccgaaccgttcggcggacggcctgaattttttgtctgtttcccgaacgcttgaccggatttggcggctgataaacgccagcagccgatcggtctctttttctccgtatagggatttgaattccttgaaataatgcatgtgcagcagcaaaaagacgaaggaattgccgtagcgttccgcccgcttgatttcctcggaaagctccagcttcatccgcagatggttgtcaaagccggtcaccctgtcgacggcgacaaagctcgtaatctcttcacgcagctgtttcactgagcgttcaagccccttcgccaactcgtgaatccttcccgctatgtaagaaaagagcagcagcgcaatcccccaaatgaccagcacctgcagactttcggcatcggcagacgccataaagctcccggtctgaaaccacaggagcaggctgccgagaacaaataagacgagtaaggtcatgacgagcgcgtagattgccccgaaccatataccggctcccgcaacaagcaatgtgatgcaggttatcagaagccctgcggattgctgagacgcatagtaaataaaaaaagacagcagcaccagcataactgctgtgtagctgcacagtttttgtgattcattgaatgatattttcattaaacaatttcctttcagccagaagcggcagcaggttatcgaaagaatgtgtatcgctcccgctcatatagccgccgtaatcgggtttcagcgtgtccagtgtttcaaatgaagtcattctttcataaagcggcttgatgacagccggatcagctttttgttctgctaaaaaaagaacggccagggcgtaaacggacggtgattcgtactgaaccgccggctccttcgtgtctgcgctgtatcgtccgtacagctgtccgcgcgacttaaattcctctatcatccattttgacagcgcggcagccttgccatcgccccgcttcagattcacggcggcgtacagctggtcgatgacattcacttcgctgtcatatttgtattcctttgtttcggtattgaatgatttcggcagaaaaccatttttcaggggagctcgattgagaacatcaaggttccggttttccgttttctcatcgataatccctttttctctgagcatctgtaaggcgccggggtcaacataggacaaggtcacggtctttgatgcggcatttgaagcggcatcataataatccgtaaaatacccgtcatttgtattgtatttttccagcgccttcccgatctgcaccgctgttttcccgtattcactgtttccccacagggttccggcctcattcagacagttcatgattctgaaatcgtcaattaaggcattggtgccgctcgctttattcccgtcaatcttccacgacacgagcccgtttttcgtcagaaacgaatcggtgagaagctgatattgcgcttgaaactgccgttcatctttcctgttcagcaaaaatgccatccatagtccgagagactcagataaatattccggctcaccggatatgttcgtccggatcatcccccgcccgttcatcaatttatgataaataaaatgctctgcgggctgaagcggtccggacggttcggccgccgtctgtttttcaggtccggcctccgcgcaccccgccgtcagaacgattgaaatcaaaaggatcatcagacgaaaaacgaattgcttcacagtccatcctcctattttacaaatccttttttagacccatatcttattttttcacaaagtatttttactataaaggaaacgataaaagaatactagcattttttcacattggaaaattttaaatggaagcgccgcctctcaccttttccctcttcacatggatcgtattcccattacagtaaaaaacacaacaaaaggcagcatttctttacaaatgctgcctttctctgatctatttatccaggccgagttttttcagctgttctgccagcgcgttgttcatcggctcctctttgttttggcttttcatataagagttaatgtcccgcttggatgcgcgtccggatttatctttcgccttccgcttttcaaagacggacagtttctcccggtggccgcatacacatgcgaaggtttggccttcgccctggccgcgaagctccattttcttatgacagttcggacagcgggcgtttgtttttcttgccagcgttttccggctgccgcactcacgatcctgacatacgagcatcgtgccgcgtttgccgttgactttaagcatcattttgccgcaatcagggcaggcggtgcctgaaatgttgtcatgtctgaaagtctggctgctgtttttgatctccttcaccgttttgcccgcatatgttttcatgtctttaatgaacacggcggatttcagtttgcccgctgcgatggcggagagcttttgctcccattcagcggttaaggccggcgatttcaaatcttccgggacgagctgtaagagctgcttcccttttgacgtaatgaaaatatctttttcttttttctcgatcaagaaactgttgaacagtttttcaatgatatcagcgcgggtggcgactgttccgagtccgccggtttcacccaatgttttcacaaggttcttctcttctccctgcataaaggcgcttgggttctccatcgcggataacagcgtgccttcattaaagcgcgccggcggtttcgtctgaccgctcgtttctttcaatgatgagacagtgaggcgctgcccctgctgaagatccgggagcgtctggtctttgtcttcctcatgatcgtcgtcatcctcgtacatatcatacacggctttccagccaggcgattgaaccgttttcccttttgcggtaaatgtttcgccgccgatatcggctgtgacctttgtttcttcgtattcgaacgccggcattaacacggcgagaaaacgtttggcaatcagatcgtaaagctttcgttctttgtcgctgaggcttgaaaggatcagcggctcctctgtcggaatgatggcatggtgatccgatactttcgcatcattgacgaatcctttatgcgctttgacgccccgcttcagtatttgattgacgtactgggcgtacggcttaacttccatgccgtttaaacggtcttttaaagtcggcacgatgtctgcggaaaggaatctggaatccgtccgcgggtaagtgacaagcttatgctgttcatacagcttttgaagcacggacagcgtctcttttgcggagaaaccgaagcgcttatgagcgtcccgctgcaattccgtcaagtcgtaaagaccgggagcgaagctttttttcgccgtttttttcaattctgaaatgactgccggctttccttgcaggtcttttgccaaacggccggtcaccgtctgatcgaacgttcttgtctgttttgtttttttatcctgccatgtcagcgtcatctgatcagccgccgcgcggaggccgtaataaggaacgggtttgaacgcctgaatatccgcttcgcgtttggcgatcatcgccagtgtcggagtctggacgcgtccgcatgacagctgcgcgttaaatttcgtggtcagggcgcgggtcgcgttgatgccgacgatccaatccgcttccgctctggcaacagcggaatgatacaggttttcgtactctttgccgctgcggagcttttgaaatccttctttaatcgccttatccgtcacagaggaaatccacagccgcttaatcggtttgcggacgtttgccttttcgataatccagcgggccacaagttccccttcccgtcctgcgtctgtagcgattacgatctggctgacgtctttccggacaagctgagctttgaccgcattgaactgttttcctgtttttttaatgacgacgagctttaaaggctccggaataatcggaagatcctcaagccgccatgattgaaattctttgccgtatccttcggggtcagcgagcgttaccagatgcccgagcgcccatgtgacgatgtagcggtcgccttcaagatatccgtttccttttttatgacacttcagaacacgggccaagtcccggccgactgaaggtttttcagctaatacaactgtttttgacatgcttttcacttctctttctttcacactcatcctgttattataacagacttcctcacgctctctctaatcgaggacgttttttgtgtcaatttctgagaaaatgacgtgggtcacggtttgggcatacggagaggtgcggttgatgaagtgttcgatcgtttccagactgtccgcgttaatcttcagcatataacacgccgccccggcgacccgaaaacaaaattcaatgttgggaatggattgaatgtaggttttgaattgatcgtattttccgtttttcaccgtcgcttcgacaatgcaggagacggggagcccgatctttttttgatcaatgtccaatgtatagcgcttaataacgccgaaggattcaagctgtctgacacgctctgtgacggacggggctgacaatttgatttttctgcccagctcccgcatggacaggcggctgtcccgctgcagctctttaatgatgctcagatccacattatctagtttcatgactgtagtccttccttacccttttggctatattatcaagagaaatccgaaaaatgacaagaacaacaggctgaaatcatgaaggttttttcaggaactgacgcgaaatggtcatattaggactgccctttgcttatagtatagaggaaaaaagatgtccgacaggagggagctgtatgttacacacgccgatcggcagacttcgcacgatggggtttattgaaggaatgtcgcttttggtgctgctgtttatcgcgatgccgctgaagtattgggctcatcatccgctcgccgtcaccattgccggttccattcacggcggtttgtttatcatttatctggcggtgctggcgtatgcggcgtttactgtcaaatggcatgtgaaatggtcagccgccggttttatcgcggcctttattccgttcggtaattttatttatgatcgcggcctgagaaattatcaataaaaaagctcctcttctgcagaggagcttttttcatgcgttacatccatttcgtcacccaggcgatataataagcgccggggatgaatacgagctgggcgagaagcgtgcccgcgacccttgatgtgaccatcgtcaatgaggtccattttaaggagacgtagctgcgcttgcccttcgccacatcgtctgccagtacggagactttcgggtcaacaaacacggccagcagcatagtcgcaacgccgttgattaagcctgatgccataacggccgtcgtgctgtgctcaggcgccagaaggccggcgtacagagcggacagaacaccgatcgtgtaaatagacgtaatgaccatattaatgacaaacaagcgtttcggaatcattcggaattgaagcccctttaaataggagactgacggcagtctgatataagaacgcgcatgcttcagcccgttcagtgaaaatccttttttaaatacctgcatgacggagcctcctccgtccgccaagtgtataatcgccctggagaataacgcgacgaatgtcggcaaaagacagatgccgagcatcgttccgaccgtggagccgaatattaaaaatcgaaactgagcgcccacaacagacagagcgtttgatccggcggcatcaatcagatgtccggtaaacggctgctgaaccatgtttgacatgcgcgacacaataaccatgacattaaataatgacagcgcggacgcgataaatccgactctcgcgccggaaagccgtgttgcataggcaagcgtttcaatcgaatgtatcagcagcagaaaacagaagataaacagtacttgtgaagtaataacgtgcaatgtatgattcctccaaatcttttcatactgattagactctgcagactgcggcaaggtttcggccgtttacataaaaaaaccgcccggatgtccggcgcggttttgtcttattcttttcttacgcaaataaataatatatggttgcccgccttagcctgcgggtgattcgtattaacagttccgacagaatcattcttcgaaagtaaacaccatggaagttcttgaacacaagacaacgaaagccctacctctcaatcgtcactgcggctccgaagccgcgccggtgtgaattgtaaaacaaaaagtcttttttccatctcttcgttaggggcgaatatcagaaggaaaagaataagctcagctttttttcaagctgtccgttgaagcctgaagcttctatatcaaaacagaaaaaagaagtttactttcttttttatttgcatgttgtcacttagcagttaagtataacagattgcccctgaataatcaaatgatttattaaagttccagctcggccggcgttttttcacccgcattcatgagcttgatctgcttcggttcaatttcgagaatcaccaggttcggatcgtcttttccgtcaaaccagcgttccagtttcggatcccacagcttttcttttaaatctgctgagttgttcagtttggcggttccggccacttccacataagcgtcaccgaatccttcacagtcataccctaacagaatatgaacattcggattgttttcaatttcttccgctttatgagtgtctttgctcgtcggcgtgtaaatcgttaagccgtcatggaaaaatgtcatgtagcgtgaatgcggtttgccttgctctaccgtcgcaagcgaaccgactttatgatgatccagtacttcaagcactttttctttgatttcattttgattcatgaagaatcactcctttttaacgtctccgctgttacttttccacattggggagacatttaaaccaagaaatgtgctcttctgccgatcttcgctccattcccgcttcagcatgctgtagttcaccgtgtcatgataggcgccctgtacaaaaatgccttctctcgtcagtccttctttctgaaatccgagccgttccgccaccgccctgcttttcgtgtttttttcagccgcgctgatcatgatgcggttcagcccgaggtcctgaaatgcatgggtgatgaccgcccggcagcttgcggtgataatgccgaatccttcatgctctcgatccagccagtagccgatctctgctttttgattgactgtatcgacattatggatgctgatcatgccgcaaaaccggcccttcacaaaaattccggcgtcaaacccattctcttccgcatatttatagcgccattcggggatgatcacatcgcggtacgtatcgatgtcagccagttcttccgcccagctgagccattcgctgagatggttttgatttcgcttcataacagaatacaattcgtccgtatcttctttggcaagcaatctgatcgtcagatgttcccggatttgacaggaaaacacgaccgcaccttctttcctttattagccattatacaggtaaatttatttttttccatacaaaaaagatgaggcgtgcagcctcatccttaaatgcgcgggtcggtgaaaacatcgtgatcatccgtgcttgtcgatgacatttccgtaacgaccgccccttcttctcccgcttgaaaccaatgcttcgtatccggcggaatggtgtattgtccgcccggctcaagcacaatctcatgccagacggtgtagtattccttgtcttcttccggcgggaggacgcttgggttctctgtcttttcgccttccacgtagagatacaccttcccccagcggcatcggaatgtctcttgttttcccttctcgccgccgaccggcggatggcggtgttccggacacgtctggcgcgggaagagcaccaattctttcgaacagtagcggtcggtattcacgtaaataaacagctgaagcccggtttcctcaagcttgcctaagccgtaatccatgatttgaatgtcttcgacttcatcatcagtcagaacgattcccgctttttgatagtatgcattcacgtcatgtttcgatatcgtcatcggtcagcctccttatgtggtcacaaatctgccgccgttgacatgcagcgtctgtccggtcatataagaggattcgtctgaggccaagagcacatagcagccgacatgctcaacaggctggcctgcccggcccatcggcgtatcctgaccgaaggaagcgactgtttcttctgagaatgtcgccggaataagcggtgtccagatcggccccggcgccacggcgttgacacggataccatcgttgacgagcgcttgcgccatggatctcgtaaaaccgttaatcgcgcctttcgtagccgtgtagtcaatcagctgcgggttgcctgtgtaaggattaatggatgtcgtattgatgatcgcgctgcccggcttcatgtaatcaatcgcttttttagtcaaataaaattgtgagtaaaagtttgtcttaaaggttctgtgaagctgctcgcttgtgatgtctttaatgctttctttcggatgctgttccgcggcgttattcacgagaatatcaagacgcccgaattcttcaaccgttttttcaacggcttcattgcaaaagtcttcctcaccgacatcgccggggattaacagacattttacgccttcttcttccactcgtttttttgtatcttccgcatcatcgtgttcatcaaaatagacgatcgcgacatttgcgccttccttcgcgtaagcaaccgcaacggcgcgtccgataccgctgtcgccccctgtgatgagcgcggttttcccttttaatttgtcagcgcctttatattctttgtattcgtaaacaggcgccggattcatttcgctttcaatgcccggctggcggttttgtgattccgccgggaattccttcggatagttttccatgtcaagttcctccttctggttcgttgtcatatttcttgtctacctctgctgtcttccggataaacatgattgagacagttcaaaacgttttcggagaaaaatgtttcacatggaacgcaagaaaaaaacccggctggcagccgggtttttgttctctattatgaacgtaccgcttgtttgcggagcacgtcttttctcacttttccaaggttgtttttcggaagttcgctgacgaactcaatgtccggaattttaaaggcagcaagacgttcttgaaggaatcgggtcacttcttcttctgtcaggtcttctctgccgtttgtcacgatgaacgctttcggcttttcgccgtagagcggatcagggataccgacaaccgccgtttcgagaattcccggcacttgctgaatgacttcttcaatctggtcaggataaatattatcgccgccgtagatgatgacatctttataacgtccggtgataaagataaatccgtcttcatccacatagccggaatcgccggtatggaaccagccgtctttcagcacttttcgtgtcgcttcttcgttaccttcgtagcctttgaataaaaacggacttgtcacaacgacttctccaattgagccttgcggaaggacttcacctgtttccggatctacaacgcggacgtccacttcttccatcggtttacccgcggaagcggctttatccattcccatttgcggattccaagagctgatgccccacgcttccgtgcttccgtatccgtgcatgagcgggatgccgatgtcgagatactgctggatcaggctgcttggcacctttgtgcctcccgtcatcatataaacgatagaagacatgtcagtctggtgcgtttcccatgctttcagcaggtatgtgaaatagactggcagcgccatgatggtttgaattttttctttttcgatgagcttcaagttttccacagggtcctgattgtctgtcataatgaatgtcgttccgctcatcgtgccgaccatctggcagataatcgcgctcgtatggtaattcggatggcatgctaagaagcggacatgctgcattctccccgtgtaagccaatgtcgcgtttacgtagttgtatatgccgccgtgagtgatcatgcagcgtttcggattgccggttgtacctgaggtaaacatcagcaatgccgtatcgttttcagacaccgtttcgacatccggtgtatcaccggagcctgtcaataaagcgtcaaactcaggcgttgtctccgcagctgttcctgtctcgatcttcagtttaagagaagataccagcgcaggaagaacttcttccataatctctttaaattcagtgccgaaaaagacagctttcggttcacaggctgctaaaatgcctttcatttcgtaaggtgttaattgccagctgaccggcacaacaaccgcgccgatttcgagtgccgcaaacatgacaatggatgacgcgtggccgtttttgcaaagcatcgccactctgtcgcctttttttattcctttatcaagaagcgcttgtgcaagctggttgattcgttttcgatattccgcgtaggtcagggtatgcgcaccgctttttacagcttcgatctcttcgctatttgaaatgtcatgcagaatcatatgctgtaatgtctccatattttcatctcccataatcataaatcacaaaaaactctgtcagattttcttcctcacgcaacccattttaaaccaaaaaatataacttgtaaaacaattttgttttagaactattccattcgtgaatgatacaatagtcccatgtttttagtttcttcccttccccttaccctcatacatgcagaaaaaaacacaccccatatgaggtgtgcgctttctgtttaccgctgtcctttctcctgaatgaaatgataaaacagcttgtttaaacgtttgtataaatcggcttcatcctccgtctggaaggcttttatactgtcttcggactcgatgatggcggagctgaccgcacttagtatttccgacccttcagcgggcatatcagccggcgccatcatcaccaaagcgcggccgacggtcagggaatttccgtccatgcctttgacactgcatggagctgtcaaatcataaattttgaaaaaaggcgtgacaatttcttcatttttgagatggtacagcgccatcgccgttcccggaatgccgagtccgccctgtcgttcacgctctgcaaggcgctgtgcggtttgtttggcattacggacaaatccttcttgctcaagcatggcaaacaaacgattcaaaaacagttcgtacgccgtgtttgactcaatggatttgatcgaaaagttccgcagcacgctttggataaccgccgcataatgtgccatacggccggccgcttccagcatatcaggcgtctccggctgcttctcttctcttttaccgtttctttttttgtcaagaatcagcggaatttttcttttgatgtactgcttcacctgatcagcgtcttcttcgtttaaaagcggactgaccatgacgtaatcaatgtttccatacgggatcggaacggtggatacgatcatgtcatacgcggtgatgtctcggtccttcagttcgatgagggaagacatatcaaaggaacggatttccggaagctcctttttcagtctggatgcgagcattttggacgacccgatgccgctggaacagacgatcagcgctttgatcttcgcttcttcccgtttgatttccagagcggagccgaagtgaagaacgatgaaagcgatctcatcatcagagaaaagaagccccggaaagaatttttccattccttcttctacggccatgtacagcagaaagtagtcgcgtttaatttgctcggtcatcgggttgtacatgtcgatattttctttcacccggttgatcgcaggctccagatgggcgattaaaccgtcgtataaagaaccgttttccgtcagatcaattttgattttttcagaaatgaagccgatcagctgcttcgtttgcaaggccgtttcaacttcaatgttttccggtttgaattccgttttgtattggcggttggcgctccgcaaatgaatggtgatataaccgatctcagcttccggaattgaaacgccaaacgctttttcaagctcttttgccatttccatcgcagagccgtactccttcgtctgctgcagcgcttttagttccgaagcctccatcgtgatggtttctccgagtctgattcggtccatcgcaaaggttaaatgaaccgcaagcgccatgtatgagctgtcagataaggcgatcgcgattttttccttgagctgaatcaagagccggtccattttcaaaagttccgctttatttacgaccccgaacattttttcagcatcgtcaggttttcctttaatattgaattcaaccgcttccaaaaagctctgaatatcaagccggttgacgatgagattgccgacgattttccgtttcgcattttccggacccgtcagctgtatgccgaagcccctttttcggatcagcgtcaagccgaagggcgcgatccaggtctccagctcatccagatcataactgattgtcgcgtttgtcacttgcaattcgttcgccagactgtagagcttgatcggctcttgcgactctaatagtgaacatagaattaaaagtttccgctcctcagcgctgtattcatgctgttcataggacaggtctgacaggagtttttgtttgtcctccgggtttcctaccgctttcagtcctttgccgggctgtttatcaagtgccagaccgaatgattccatcatcggtttgattgtttttaactcgcggtgaacggttcttgtgctgacttgtaaagcttctgccagttcatgcactgtctcgtaacggttctgcagtaatagatgtttcattaatttttgttctctcgctgtcatatacatgaaacgcgcctccagattttctagttgtgagaagtatggcatatggggagtgctgccggggaaagtggtgtaaattataatataaaacgctttcaatgattattcaaccattttcaaatggcaatttggcactggaccgtgtgacagtattgaaaaagaaaaatgtgtcagataatatgccatgacgcttgttactcttgatccgcacggctatacttcaaagtgaccttacttgtttttagacattgcacaccacataaacaaacgcccggaagataccttccgggcgtttgttctgtttatggaatatcgcagccttggacaccggtataaatcctgaaccactgatcatggctgagtttgtacgcggatgcacgcaccgcggcggaaatgcggttctcttttccgctgccgacaatcggcatgatgtctgccgggtgggtgaacagccatgcgtacatgacttcgtcaatggaagcggcgccgatttcttcctgtacggaacgaagcgcggcacggattcggagggccttatctgattgtcctgtaaagacgctcccgcccgcaagcggtgaccacgccatcggcggaatgcgtttttccagacagaaatccagcgtgccgtcatgaatattttccagcttgtacgccgagatttcaatttggtttgtgacgagcggatcatccaaataggattcgagcattctgtactggtgcgctttaaagttcgataccccgaaatatctgaccttgcccgagcttttcagcgcgtgaaacgcttcagccacagcctccgggtccataagcgggtccggtctgtgaatgagcagcacatccagataatccgtattcagattcaaaagcgactgctccgccgacgctaagatgtgagacttcgacgtattataatgatgcgacttgtttcctggccgctccggtgattcaatgacaatcccgcattttgtgacgatttcgattcgctcccttattgaaggcgaaagggacaaagcgccgccgaacagcttttcacacgtataaccgccgtatatatcggcatgatcgaaggtggtgatgccttggctgatacaccattcaatcagattcagcagctctccgtctgaaacattccattcgttcagacgccaaagcccgtgtatcactcttgaaaattccaggtcttcagccaattgaatgcgctgcatgtgaaatccccctttttcttagagcctcttgtatctctgttttcaggaattgcccatgctgtttcattctgcttcggcggccgattttcctttcagcccgcaaaaatcgtcatttaatgattctgaaactgctttttcgctttttcaacgacgtaatggcttccgccgcgttttttgacgtcttgaatcatcatcgcgatcaagaggtctttctttttataatcgtaaccgacaaaccagccgttttctttgccgtctttatcttctttagacgttttcagctcggctgtaccggtttttccggctacggtaatgccgcttacggccggctgatatgcagagccgcgcggatcttcaacgacgcctctcagccctttcgtgatttcttcggcattggctttcgacaccacttgcttatgccagatttgcggtgttttttctccgtctttgatcaatgtcggtttgacgagatttccgtctgttacaaatgcggtatagtcagccgctaagtgcagcggagacatcagcatctgcccctggccgtagcccgtatctccgagaaggatctcggaatctagcttgccgttagcgattgaggacttttcaatcggaaattggtacggaatctcttcatcaaagccaaatgtttttaatccttttgtaaacgcgtccgctccggcatctatggcattttgcgcaaagtagatgttgtccgatgtgatcagcgcgttttcgagatccacttcattcaggcgctctgatacgcgtgtgacatggtaaccgccccagctcgaatctttctgccactcttttccggtgatttttttcttttccgatgctttcaatgtgccgtttgtcaggccgactgccgcggcaatcggtttaatcgttgatcccggcgcataaagtttgttgaatttcgctgaaaacggattgtttttatcttcattcagctttttccactcttttccgctccagccgaaaagaaagccgttcgggtcataagacggtgcgctgacgagcgcgagtgtctctcccgtttgcggttcgagggcgactgccgctccgctgtcatctttcatagaatcatacagcttcgtctgcgttttcatgtcaatcgttacatgaatatcctgcccgctttcggctttcttttcagcaatgacctcacctgtttgcgggacgtaaattttccagccggtcttgccgcgcagcttgtcttcatatacattctcaaggccggcgatgccgattttggaagtatcgctgtattggccgtctttcgcttttttcagctgctccgctgtgatggttttaatatagccggtcagatgggccgttttttcgccgtacggatagtagcgggagctgactttcgttttcgtcacgccgtctaatgcaagcaggcttttgaccttgctttcatcatccggtctgattttttgaatcgggacataggagtcgtcttttacccagccctggttcagtttgcttttgatatcgtcttcagaaaggtccagtttttcagacagtttttggatcacgctgtctttatccttgccgagttttccagggataatgccgatttccggcacctcggtattcacggcgagaccttttccgtctttgtcgtaaatttgtccgcgcttcggttcctcatttgcgatctgcacggttttgtcatcggaaagctgtttgaaaataaaagaaggattccagtcaatgttccatgattctccatcgtctgttttctcttttttcaggacggccgtgttttcaaaagcgaccttccctgcttttgtatccatgctgactttataatcgatgtgctggaggtcatcttttttcttatcgtcttcgtcctgtttttcggcagtgactttcagatttttgacccctgcttgttcataaatggtttcatatcgttttacaaaatcctttttggatcgttttttcttttcatcctgggtgaggctttggtacatcttatcgtaatgaccgccgttccagtcttttacgaaatctttcattctgtcttcggccgattccgttttcgagcagccgatcaaacctatgattcctgcgagtaaaagtaataggtataacccttttttcactgtcaattcccctgccttccaactgttattttctcctaaaccaaatcaggctggcaaggatttttttctcatagcgtttaaaatttttttgtttttccggccgtcacggcccatatttttatacaatgtatctattaaaaaaggaggaatttcagatgatcagagaagcagccatgctgtatgtaaaagaaggtcttgagggggaattcgaagaggcattccgccgggcggagccgattatcgcgggcatgaaaggttatctgtcccattccttgtccaaatgtatggaaaagacgcataaatatttgctgcttgtggaatgggagacattagaagatcatacaaaaggctttcgcggatcgccggaatatcaggagtggaaagccttactgcaccgtttttattcaccatttcccgttgtggagcattttcaggatctatcagactcagatcgcgtgaagcgtaaaaccgattaaggagatcgaccatacaaaaacggcggtatagatattgaatttcccggagccgtcgttttctttccgtttttcctccagccctgaatgaacatgaccgcaccgagaaacacgagcataaccggctgtatgacggaggtatgttccgcatacgtaaatgcggcggccgcaagtataataatcagcatcgcgagtgacagttttaaggcgcgcagcaaagcaatccatcctttctgttatcattttttgaacacaattctatttctgtctttatcccccattattctagcgtactttttgcgcggatagaacgaaagtcggacaattttaagtttgttttaaggagcacgaaaagcgcgctccccatgaaaaggagcgcgcggtttatgagcgggcgaggcttccgtatccgagcccccgcaggacgcatgccatgacttcataccccttgctgttggggtgtacgcggtcataagaaagatattcattcatttttcctttgaaagcgctgtggacgtcggcaattttgacgtgcggcgccgatgcgagtgtgctgaggtgcgcattataagaggatatccatttttctgcaatggagatgcccgggaaaggattgtataaattgaagacgcggatctcataaggagacgggtgcgacccttttaaggcagcaatcttggttatcatcttttcaaagttctcatggcagtgactggacacgctggtgaataccgaagcgtccgatgtttgctgatatgcctgaaccgaatcgatcaaatcgttgccgcagcctgtaatcgtaatcatatcagcagcctgaatccgcctctgaatgtacgggaaggacataagcccgagaatttctcccgtctcaaggcctgatttggcaaagatggatacgtcggttcttgtctgtaaatcttctgccatcatgcgcccgaaccgctggacaaaaccggcggaaaacggcccggatcccctccccgtcgtcaaagaatcccccagcgccgtataaacaagtcccatttactttcctccactcgttactatcgatattgtaatgtacgcgagtgaagaaaaattggctcggtcaataacctaatttctcagaaatatgctgtgcggcgtttttgaccttttcggttaaatacggcagcctgtcctctgaaaaccgggcttcgaagccggcgatgctgattccagcagccaccttaccttcgtgattgaaaatcggcgccccgatcgccgccgtataatcttctaattccgaatagctgatcgtataacctgattgcaaggatctttcaatggagtgaagcagttcagcccgatccgtcatcgtgcctgaggcgattgcggcaagctttgtcttctgaatgtatgtgtcaatctcctcttccggcagaaacgataaaatgcttctggcgcaagctcccgcgtacagcggcgaccggcggccgattgccgtatacaggcggacggtttgggtgccttcaattttttcgacgtaaatggcttcatccccgtccctcatgatcagctgaacggcctcatccacttcgctgcacagctcttccataatcggtttggctattttcctgatatccagacgttcagagacgagctggccgaattgtaaaaagatcagaccaagctgataacggccgtccgccgcccgggtgagaaaccctgtttcctccagtgagcttgccatccggtgaaccgaagtcttcggcatttccgatagagaaaccagctcatttaagctcaggctcggttcagtgagaaacaaatgaagcagttccattgatttgatgacggttttgtttttgttttccatggtctttagcccctttgtcagatcagccattccattttgagccttgctttcagctccttcagctgctgttccttctccaaaagcagcatttccgcttcctccagcgaaacggcccggaacgtaatatgttcccccggcatcgtttgggcgacgaggggaagatcggcggatatgatatgcgccattcgcggatagccccccgtcgtctgtctgtcagccagcagaataatcggattgccgtccggcggcacctgcaccgttccgaacgtcacagcctcagataccatttccagcggctcccgcaattcaagcggagcgcccttcagccggtagcccattcggtcggattgaggcgtgaccgtatatgactcttgataaaaacgtaattttgcttcttctgtaaaagcgtgaaattgagcgccttcaagcactcgtatgaccggattttttttcagcggcagaaaccctctgctgctgacagaccaatcaggcgctgagaaaccatactgtccgaaagaatcgctcagacggtacgcgattgattccgaacatggcgtcatacggccgagcggcagctcatcatctttttgcagcgctcttccgcaaaagccgccgatccccgctctgacatacgtgcttttgctttccatgacggcgggcacatcaaatccccccgcgacggcgagataagcgcggctccccatcttgcacggcccgaatgagacgacgctgttttcctttatcaaaaccggtttccacagaggggcgggctccccattaatatgaaaggcgaaatccgcccccgtaacggcaataaccgcgggttctgagaactcaaaggaaggccctggccccataagcgtaacttcaagccccgcctctttttcttgatttccggcaagaagattggcgatgcgcagagagatcgtatccattgcgccgcttcccagcacaccgtatttctgatatcccgtccgccccgtgtcctgaaccgtcgtcaagagaccgggttttaccactttcatactcattcggctccctccttgatgcggctgtactcctctgctgtgatccggacgaatttcaccgtatcacccgctctcaatagactcggcggatgttcttccggcctgaaaagccggagcggggtgctgccgatcagctgccagccgccgggagtggatatcggatacacaccggtctgcattcccgcgattcctactgaaccggccgggatggacggccttggcgacgcctttctcggcgctctgatccgctcagacattccacctaaaaacggaaatcccggcgcaaatccaagcatataaacgagatattcgccttcagtatgaatgcggatgacgtcttccggggtcagatcgttcatttcagcgacctcttctaaatcgggaccgaaatctccgccgtagcaaacggggatttccatcacccggcgctcttttttgcggccggtcattatatggctgagacgttctgtcacttctttcttgaccagggcaaaaggagagacgcctttttttatgtttgagacggcagacacgtcataaaagaccgttaagcttgtgaatgccggaatacattcaacgaagcccggaaacggccgttcttccatacaggctgccgccgcctgcacccggctgttgacctcttcgctgatgtgcccgccaaagcggatgataacggcggaatcaccgtacggctgtatatcaagcgctgtatttccgctatactgcatcattgtcatcacctcgttgtattctttctcacttacaggacagcaagcgattcattttgtatatcggtgatcagcatgtgccccggtgaatgtgttattacgatatcaggctttgcttccatgatcaccgcctggggtgtaacgccgcaagcccagaatacgggaacttcaccttcccgcaccgttacggcatctccgaaatccggctgatgcaaatcgctgatgccgatgctttgcggatttccgatgcggacgggggcgccgtgcacggcgggaaaacgtgacgtgacctgcgccgcgcggactgccagcctttccggaatcggtctcatgctgacgaccatttttcctgaaaacgggcccgccggaatacagtcaatatttgttttatacatgggaacgttcacgccttcatcgatgtgcctgatcgggatgtgctgattaataagggcctgctcgaatgaaaaactgcagccgatcaaaaacccgacataattatccttccaatacggcgtaatatccgttacctcttcagtaagcacgccatgccgataaatcctgtatttcggaaagtccgtccggatatcagctcccggcgccgctattgccggaacgggtgaacccgcatccgtcacatcaagcaccggacaaggcttttgattacgctggcagaataagagaaaatcaaaggcaagatccttttgcaaaacgacgagattggcttgtgcgtaagaagcggccaaccccgccgtcggcccggtcatctgccctttcctgataagctgtctgacttcttcgggactcatatcactcatatggtttttcatatcatcagctccatagctgcggcatttgcgagaataatgtatagatgcccataaccgccatgacaaccactacgatcgcccctgcaatcgtgagccagatcggatgcttgtaatcgccgacgatttttttcttataggcgcccaacagaatcatcgctaatgcaagcggcagaattaagccgttaagcgaaccgaccgcgaccagaattttggcaggctggccgatcgtgacaaaaataagagtggatacaataataaaaccgataattacgccatgtgagtgcttttcgatttttgccgaaaacgatttgaagaatgacaccgatgtataggcggcgccgatgacagacgtgatagcggcagaccacatgatgacgccgaaaattttatagccgacatttcccgccgcaagccggaatacagaagccgcgggattatcaggatcgatgcgcaggccctttgaaacgacgccgagcacggcgagaaacagggcaatccgcataacagatgtaatcaagacgcctgtgacggagcttttcgtcacctgaggaatgacttccttcccttggatgcctgaatcaagcaagcgatggcctccggcaaatgtaatgtatccgccgaccgtgccgccgacaagcgtcacgattgccagcacactgatatgatcaggcataaaagtttttacaaccgcgtgtccgaccggcggacccgtcgttacggcaacatacaccgtcaatacgatcatgacgattccggcgatctgcataaaacggtccatgacttttccggcttcctttatgacaaaaatcagcaccgcgaccgctgcgctgattaaagcgccgatctccggtttgattccgaataatacttgaagaccgagacccgcgccgccgatgtttccgatattaaacgcaagtccgccgagcacgaccagaaaagcaatggcataaccggcgcccggaagcaccatattggcaatctcttggccgcgctttccggaaaccgcgataatccgccatacattggtttgcgcgaaaatgtccaaaataatagaaattaaaatgataaagccgaagcttgccgccaatgtattggtaaacgtggccgtttgcgtcagaaagccgggcccgattgatgatgtcgccatcaaaaatgtcgcgcctaaaagaagcgaccatttgccggaagcctttccggctgtttttttcttttgctccatgctgtcttcctccctctgctgctcagtcttttgcaagcgcgctgatttgaatgtctgccgcttttaattcttttttgattgtttttgcgaatgtcagcgcgtgggcgccgtctccgtgaatgcagaccgtgtccgctttcaggtttacagcttgtcccttacgtgatgtcaccgtgctgtctttcaccatttgaatcacttgaccgaccgcttttttgtcatcctgaatcagcgcatccggctctgaacgcggcgtcagcgtgccgtcttcctgataggtgcggtccgcaaacacttcgcttgccgtcctcagtccgattcgatctcccgctttaatcagctcgcttccggaaagcccgaaaagaataagcccgggatcaaaatgacagaccgcctgagcgatggcttttgacaggccgggattgacggcggccatattatataaagcgccgtgcggcttcacatgctgcatctcgacaccttccgcttttaaaaaccctgacagcgcgccgatttgatacagcgtcagatcatacgcttcctcgggcgtaatcgcgatctgccgccgcccgaatccctgcagatcgaacagcccgggatgagcgccgattttcacgcctttttccgccgcaagcgcaaccgttttgcgcatcacgctgggatcacccgcatgaaagccgcaggcgatgtttgcagatgtcacataatccaaaatctcttcatccagtccgattttataagcaccgaaactctctcctaaatcacaattgatgtcaatctgaaacataagctccctcctgtattgtaaacgttttattttattatcattccgatatttggaacgactattccgaattgttggatttctcttcattatatttaattctgacaagtttgaacatccttttgtcagaaaacctaccatggacctagtcacaaatctgacaaaacaaaaaaagagagcctcatgctgagactctctcttttttctattataacacccagtggcggatcgctttggcgaccccgttttccgtgttgacatcagtcacccagtcagctgtttctttcacgatgtcctgcgcgttccccatggcgacgccgacacccgctttttcgatcatggcaatgtcattcagactgtcacccatggccatcacattttccatcgtgaagccgagtttttccgataccttcgccagcgcagccgctttgttgataccgagggcattgacttcgatgttgatcggacttgagtttgtgatttcgagctccttgtattccttgagctctttcagcacctcattccgcacttcatcatcctcgatttcgaacccgaacttgagccactgatgatccgtaatcgtttccgggaattcccctctccacactctatcgacggtagaggcccagaaattcgtgttgtgcttattcctcagatcccataatttttgaatatgatcggtatgaagaagcttgcgctcaaccagctcaaagttggaatcccagatttcgctgccgtttgccgtgattaaaaaggatgacagctcgagagactcagccagttcgcggcaggtcatcagcgtgcgtcctgtgctgatgacgacgtgaattcctttcgcctccgcttccttgatcgcccgccggttttcctccgggatgagctgctcgtcattgagcagggttccgtccatatcaatcgcgatcagtttaatatctgcgtcttctctttgtatcggcatatatgtacctcactttttatattgtagtcgtctctattttaatacatatgacccacaggaacaaaaaaccgcttcctgcgtttggcggggcgagcgttgaggaaaagaaatattgaggtgatggaggatgaaagaaagaaaacaaaagaacaaaccgaatgaaaatcctgaacatcatgatttaacggatccgattccgctggaagagctgaaggaaaacgccaatgacgaaaaacacaaacatgaccagagggacaattcacaaagtgagagagattatgatacaaaataacacgcttgtccgaaagccgccggtggaggcggctttttttacgatggctggataaatatgctgagctccgcttccgccacaggcttcccggcaacggacgctttcgcccggccgaacacaaaaccgcgtctgattcgcgtgacctcaaaaaaaagatccagacggtctcccggcaaagcggcacctaacctttccgctttcttcaccgcggataagagaccgagaccgtcaccgccggtaattcccgcgcaagccgccgtttgggccattgcttcaacgacgagcgaaaatggcatctctctttggtattcagttataaaccagtcattttcactgatgtttttgtaagcagccgcccattttccggcttcactgttcgtcgtgccgtcaatcaaaagaaacggaaaacgatggggcaatagcttctgattcatcacgcagcctcccttccctctcattataacgcaagaaaaaacccgcgtcccccgacgcgggttcatttttattgattgagctttttgagcacgatgccgtgcagcggttcatgcggctgaataccgcaaatgtcttgaagaacgccgctcgtgcctttttccgcgataagcttttgcagctcaaccgcttccggatcatcctgatagtcaaagcgcagggcggcggcgataccttccgccagcgcattcggttcttttatttttttggccggccctactaatctgtcattcgctccgagttttctgagcggtgatctggcgactcttgtcacatcatccgtgatgtattcattatcaaagcggctgatgattttttcatgtactgctcgtgttcggcttgcttaaagccgtacgctttcaccaagtactcgcccgtttctgaaagtgcatcgtacacgacacgccggatttccggatggccgatggcctctttgacggtttttaatccgcgctgatagccgacatacgccgtgacggcatgcccggtattgacggtaaacagctttctctcaatgaaaggcgtaagatcatccgtaaacaacgcgcctttaagtaccggctgatcgccggcaaagccggttctgtctatgacccattcaaaaaacggttctacggatactttcagcggatcttcatggtgctgaatcggcacgatccgatctaccgcagaatccgggaagccgactgtccggttcacgagttcccgctccgcttccgtcaaatgtccgaaaacttcttttttcagaaaactgctgccgccgatcatattttcacaggcaatgatattgagaggctcagaggacgttctgcgcttcagaccttccgcgatggacggggcgatgagtctgagaacgttcgggcccaccgccgtcgtaatgatcgccgcttcattgatcagcccgtacagctcttgttcttgcaccgcgctgttgatggctgaaacggggccgatgatttctgtctgcctgccgccgtcggcaagctccacggtatattccttcttttcattgagaaggctgaccatcgtttcattcacatcagcgaaaactacgtcatagccggaatgatggagcagggcgccgataaagccccgcccgatgtttcccgctccgaaatgaagggcaatcatgtcagttcacctcgctgaaaatagcggccagttcttcttccgtctttgcattgatcagccgttcgatgttttcttcctctgagcagatgatggcgatgtttgacaggatgtctaagtgttcattgttttttccggcgataccgaaaacgacctttgccgtattgccttcaccgtattccacaccattcggaatctggatgacggaaatgcctgaatgaagcacctcatccttcgcatcttctgttccgtgcgggatcgcaatgaaatttcccataaacgtggatgatgtttcttcacgttcgaacattttttccacatagccgttcttcacgtaaccgttatcaatcaacgtctgtcccgccaggcggatggcatcctcttttgagttcactgtctggttcagtttgatgttcgctttagccaatacttccatgatgaagatccctctttctgtttgattagtttttaagcttttcaatcagttcatcgtatttcgggctgtttaagaaattatcaaccgaaatgtgcaccgcctgcggcagcttcgctttcgcgcggtcagtcaggtccttatgcgtaatgacgatatccgcgtcattcggaagattattgatcgacgtatttgtcacatcaatatccaggtctgcttttttcactttgtttcttaaaatggaggcgcccattgcgctcgatcccatacccgcgtcacatgcgaagataatgcggctgacttggtcagcggaaatatcagcggcgctgttttccggctcttcctctttgtctgccaatgcggccgccgcttcacttttcctgcctttcatttcctgcattttttccgccgcggctgtcaaatcttcttcgcccgctttagacgatttcagaataagcgccgagacgataaacgatacggccgcagccacgatgacgcccgccagcacgccgagatagcttcctttcggcgtcagcgccaaaatggcgatgatgcttcccggagatgatgcggcgacaagacccgcgttaaagatcgagaatgtgagcagtccgctcgctcccccggcgatcgccgcgaggatcagcatcggtttcattaaaatgtaagggaaatagatttcatgaatcccccgaagaaatgaatgatcgccgctcccggagctgtcgatcttgaagagcctttcccaaagaacatataggccagtaaaataccgagtcccggtccggggttcgcttccactaagaacagaatggattttcccgctttggcggcctgctcgattccgatcggacttaaaatgccgtggttgatcgcgttattcaggaacaggactttcgccggctctacgaaaacgcttgcaatcggcagcaaattcgcgtgaacaatgacttccacacccgccgccagcaatttgttaagagacaggacgaccgggccgatcgcataaaacgcgataatcgtcagcaccgcgccgataattcccgccgtgaagttgttgatcagcatttcaaaaccctgtctgactttatctttaaacagacggtctaattgtttaatgagataaccacccaaaggtcccataatcattgcccctaagaacatcggaatgtccgctccgacaatgactccgatggcggccgtcgctccgacgactcccccgcggtgatcatagatcatttttccgcccgtatatgcgattaaaagcggcagaagatacgtaatcatcgggcttaccaatgtattcagctgcggattcggaaaccaccccttaggtataaacagcgcggtgataattccccatgcgataaatgcgccgatattcggcatgatcataccgcttaaataactgccgaaccgctgtatcttcactttcatgccagcttgctgttcttgctgcatgttcattccctccctgtttgcctgccttcagatgaaaataaataagacacggggtttctctctcccctgtgtcttcatcataaaacgcttacaatccccattcaatgaaaagtaaagaggagtttggcacagagactgtgacaaatccttaacaaaaaaaagacacctcatcaaaggtgtcttaccgctttctgtatataatgtgtccttttgtgacgacgagcttggcaatgagccgctcactgacaataaacaccggatacgcacatacgagcgcgaaaatggcggccggcacataccgcgctgccggaaacatcggcatgacggcggttctggccatctgcacaagataaatcaaaagcaccgtgatcgcaatggccgcagccataatcggagctgatactttatattcacgcaatttcacatggcaatgcccgcactgaaactggcacgggatcatcgatgatctgaccatgtcgcctgtaatcggcttgccgcagttcgggcaggtcgtttctttcatgtttattcctccattcaactcttctattataacagagtctgactgcgtgttttacatttgtgattgttcaacattttttcacatattttatcatcaggctcttgtgtgcatttgtgaaaacatctactcttagagggaggttcatcactcattcgcataaaaaggaggatgcagaattgcttccgattcacagacagcaaaccttgcttgaatggctgaaagaagagggcgcgctgaaaatctctgacataagcgagagattcggcgtctccgagatgaccgtgtacagagacgtcaatcagctggcggatgcaaaccggattatccggacacccggcggcattacgctccctcccgcttcagaacgaagcgccaatcaatgcggctattgcctgcggccgattcagcattcgtattctgttcagcttattaccgtttcacaaaccgttgagcagatgtgctgcattcattgcgcgattttgcggtatgaggataaaaaggatgaagtgtcccacgtcatttgtaaggattttcttcttcagacgacgctaacggcagcttccgcatactttttagtccatgccgatattgaccttcactgctgccggcctcaggcgattcccttctcaacgcttgattacgcagaacggtttcaaaaaggattcggcggggtcatttgcacctttgacgaggcggcggacatcatcttacacgacaggcagaagggatgcacctgcagcaagacataacaacaaccaaccggaaggcggtgtcatcatccatgagacagaacaaacgctggctcgtctttttgctgttccttgttttgattccgaaaacaagcttcgcccacgcctacatcacaaactcaaatccgggtgagaacagcgaattaaaacaagcgccgaagcagattgaaattgagtttaatgaacagattgaagaaggcttccactccattaaggtctataattcatccggtgaacgggttgacgcgggcaaaacggtgattcaaaaaaataatgcccgcatcatgaccgcggcattgaaaaaaaatctgccgcatgatatttacagagcggaatggaacgcggtatcggccgacggacatccggtatccggcgtcatccctttcagcatcggaaaagccggcggagaacttcaggagcagacatcatcgcaagcggcgcttcatcccgaagcggccatcgaccgcggtattttgtacaccgctctctccctgtttatcggcacggcttttttccatctgttttggtacagaaataatgaagattcatcaaaagcaaaacgaactgtaaagctgctcgtgatttctttatgtttaacggggctcgcgctcgtgtgccagctcccgatccagacgaaagaaaacgcgggcggcgcttggagcgccgcgtttcagccggactatgtaaaagaaacgcttctgaaaacggcaggcgggtacgtctggatgatccagatcagcttatttatcctgctcgccctgtccatgatcccgctgctgaagaagaaagcattccggtcatttgcgtactggacggcgccgctgttattcttcttcgcttcgcttttggcaaaagcattcgccgggcatgcggccgttatcgacgaaaaagcggtcggcatcgcaatggactttctccatttatcggccgcgtctgtatggatgggcggtatcgccgcgcttgtgctgcttctttcatcagagtggagagaacccgataaaaccatcgcttgggaaacggtcagacggttttctccttgggcgttcgcctctgtcggcgtgctgttattttcaggagtgctgaatggatttttcattatccgctcgttcgattcactctttcacaccgcttacggcaagacgctccttttgaaaatcggactgtttgtcatcatgcttgcgctcggcgccgttcacgtatggatgacgaagttcagcagaaaaaggagcatcagcgcaacgataaaggccgaatgggcactaggcattgcggtgttattcacaaccgccgtcttcacaagcctgcccagtccgcctccgcccgcgccattgccttttaacggctcagaaacgatcggaaacggggaaaccctatccttgcacattacgccgaaccagccgggtaaaaatgaatttcaagtcattgtcaccgatcataacggcagcttagtaaaagacattcagcaatttacggtcactgtttaccagacgggcttcagcggcaaacagcatgaaagcacctttgatttgaagaagacgaaggaaggcacattcgaagccgccaacctgtccatcaccgaaaagggaaactggaagatcaaagtccacggactgacaaacgattttaatgaaatcaaccaaatattctcaacgacaaactaaggagtgtatctcatgttgaaaaaaaaagctttaatattcatatccgccgtgaccctgtcactcgtcggttttacggctgcagcaagcgcccacgtctcagtcaaacccgcggaatccgcggccggttcttgggaaacgtacacgatgaaagtgcctgtggaaaagaatgagccgacaacgaaagtcgtgctgaaaatgcccgccggcgttgaatttcagcagtatcagccgattccgggctggaaaacatccgtatccaaacatgatgacaaagcggtctccgtcacttgggaagcaaaggacggcggcattcagcccggccaattccagcagttcacgttcgttgcgaaaaatcctgaaaagagcggagatgccgcttgggacgcttaccaatattacaaagacggcagcattgtagaatggacgggtgatgagaaagccgacacgcctcactcgattacgaaaataacgaaatcggcgagcgtgacggatgcgcacggagctgaacagtcaaacgaagaaagcaaatccggcgtatcagcgcttgatattgcggccatcgttctgtcagctgcggcaattatcctttccatcgcggcgcttgtaaagaaaaaacgtgtgtaagcaaaaagcgatccggctctaaagagcctgcgatcgctttttttcttatccgcggcctgcctggaaagacggatatttggtcattcccccgtcagcaaacagcgtaatcccggtcacatagcttgattcctttgaagcaagccagacggcgacagccgcgatttcttccggctcaccgatatatcccatcggaatcatgctttccacatcttttttctgaacgggatcggcaaatttttccgcgttgatcggcgtattgatggcgcccggcccgatgttgttgacacggatgcgcttcggcgcgtactcaagcgccagcgtttccgtcatcaatttgatgccgcctttactcgccgcgtagtggacaaacagcggccacggaatcatctcatgtacgcttgacatgttaatgacgtttccttgaatatcattctctacgtaatatttaatggcttcgcggcttcctaagaaagcgccggtcagattggtattgataactttgttccagtctttaagcggcatttcatgcgactgaaccggattttccatgccggcgttattgatcatgacatccaatgtgccgaattccttcactgcggtctgcacgatgtttttgacatcttcttcttttgtgacgtctccttgaacgatgaccgcttcgcctcccgctttttgaatctcttctttaacggtttgggcgtctttttcattactatagtagttaaccacgactttcgcctgctcctgtccgaagcggatcgccatcgcttttcctaatcctgatgaagctcccgtaatggcaacgacttttccttttaaatccgtgtacatgttcaaacctcctgcatatgttatgaatttgatttcgcaacgcctaagaataccgcggctacaatgatcaggataatcccgatggcaatggcgaccagctgacgcttcgttttgctctcacggagaatgaagattccgccgagcgtgctgatgacgatccccatttgagagagggaaaaacttgtcgcaactccgacgcgcggctgtgagatgaacagaaacatgttcccgagcgcccagatgattcccggcagaatgttcttgagggcgtacttattaaacggtttatgcttgtacgtcaggagcagtccgccgatgaccatcccgatcgcctgcggcagaagcgctgaccatccggatacaccgaacagccgggcgacgacgacatagaccaaatagccgagcgtggagatcagcaggatgacaatgcctttttttaagtttcccggttctccgtccgcccgcccctttttatcttctaaagatgtgagcacaatcccgatgatgataaaaataagggcgagaatacccagcgtaatcgcgatcggggttgaccattctttgaatacgatcacaccgaacaaagaagtcgagacgagctgcattcccgttgatatcggcatcgtttttgaaacgcccatcagctgtatgcttttaagctgattgctttggccgagcgaccaaaacagccccgagatgatgccgacaataaaaatgcgcccggacagcaccggatggacaaacagatacagcacaaacgaaacgatgagcgccccgattgtcgttcccagcgtctggctgtaaggcccgccgcctaatttgacgttaaataacacgatgctcccccaaaataaagccgggagaagagccagtaatatatccatgatggcgaccttctttcaatcgtatttgctgttattttgtctggaatcgaaccgattattcccgcaagatcaaaaaagcctgccggcgatattcaccggcagaccgctcaataaaaaagccccgcttagaagcggggctttcttttcggctcattaaagtccgatagacatgtatttggtttccaggtacggttcaatgccttccgtaccgccttcacggccgatgccgctttctttcattcctccgaacggcgcttgaaccgcggacggaccgccgtcattccagccgatgataccgtattcaagctgttcagaaatatagatgccgcggcggtagttttctgtgaagaaataagccgcaagcccgaacggcgtatcgttcgcaagcttgatcgcttcatcaatatctgagaacgtaacgatcggcgcaaccgggccgaatgtttcttcatgcatgatgttcatggatgtatctacatttgaaagcacggtcggcgtcacgaaatagcatcctttttcgtcgttttggtcatacgttccgcccgtcagcacttctgcacctttttccacggcgtcattaatttgcccgacgattttatcgaagccttttttgttgatgacagggccgacgtttacgcctttttcaagaccgtttccgactttgagtttcgcagcttcttcactcagttttttcgcaaactcgtctttcacggattcgtgtacgatcagccggttcgcacagacgcaggtttggccggcatttctgaatttagaggccattgtttgggctaccgccagatcaagatcagcgtcttcatccacgatcagcggcgcatgtccgccaagctccattgacatatgttttacggtgtcggcgctgtttttcatcaggattttgccgacaggcgttgagccggtaaaggtaattttacggattttcgggctgctggtgaagacgtttccgatttcggctccgtcaccgatcaccacttgcagcacgtccttcggaattcccgcttcatatgcgagacgcgcaagggcgtaagcggaaagcggcgtatcctccgccggtttgatgatgaacgtacagcctgccgccaaagcgggcgcggcttttcttgtaatcatcgcattcgggaaattccacggcgtgatcgcggctaccgggccgaccgcctgacgggtgacgacaatccgtttgcccgttgtcggcgcaggtacggttctgccgtaaatccgttttgcttcttcggcgaaccattcaatatagccggcgccgtataaaacttctccgaccgcttcttcgtacggtttgccgttttctttcgtaattaattccgcaagttcttctttattttcaacaatcagctcataccattttctcaaaagtgaggcacgttctcccgctgatgttttggaccatgattgaaacgcttgatgtgaacgttcaatcgctttttcaacatcttcggccgtctgctgggggatgctttcgatcgcctctcccgttgccgggttgtacactgttaattgttctggcatattgaacattcctttctttcctatagtaaaaccattgaatgcttgttgatgtatctcacactttcatgatagcagacacatccggcgggattccaataattgaactcacagagctgcttcgataatggaaaggccttctttgagctgctcatccgtcacgacaagcggcgtcaggaatcggataatgttgccgttaatgccggccgtcagcagcagcagtccgttctcgttcgccgttttagcgatcgccgcggcttttgctttgtccggttcccgcgtgtacggatctttgacaatttcgatggccgccatcgcgccgagtctgcgcacttctccgatgcaggcatgctcttttttccactcgatcgcttgatgctcgatgatccggccgatctcttcggaacgctgattcagcccttcttcttcaataatatccaagaccgcgagcgcagccgcacagccgagcgggcttcccgcatatgtgccaccgagttcccccggcgcggcggcatcaagcatttccgcccggccgatgacaccgctcagaggcaatccggccgcaagtgatttggatacggtgatcaaatccggaacggcttcgaaatgctcaatcgcaaaatacgttcccgttctggcaaaaccggtctgaatctcatccgctacaaaaacgataccgtgttttttacaaaaagcggcgacgtgctgcacgaaacgttttgaaggaatgatgaagccgccttctccctgaaccggctccattacgacacaggcgacggtttccggtgcgactgcggcgataaagaaatcctcaaaagcgctgatgataaagtcgtcatactgctcgtcgctcatgccggccggcttttgataatagtaaggaaacggcgcttgatacacctctgaggcaaacgggccgaaaccgtatttataaggcttcaccttgctcgtcatgctcatcgtcatgttcgtgcggccgtggaaccctcttgtaaatgacacgacagcctggcgcttcgtatattttctggcgattttcacggcgttttccaccgcttccgcccccgaattgagaaaaatcgcttttttcgcatgatctcccggcgcaagggcgcaaagtttttcggccagctcaatataagacggatacatcatgacgttaaatcccgggtgaatcagatcctccgcctgtttcttcacggcctccaccactttcggatgagaatggccgacattcagcgttccgatcgctccggcaaaatcaatgaatcgtctgccgtccaaatcgtacaaaagcgccccttccccttttaccgccatgctgcggtttccgttgccgacccccttggaaacgaattggtcccgtttttgctgccactgggcagttgtcacttccgatgatgctgttcgactcatagattccatccccctatattgttttcttatcattctgacttctttttggtatgatgaaaagtaccaaaatcaatttatccatggtatcagaaaggagcagggtctggatgctgacgatttccattaatcattcggaaacggcggattatatctatcagcagatctatcagcacataaaagcggccgttttgaaacgcagcctgatgcctcatacaaaggtgccgtctaaacgggagcttgccgagacgctgaaggtcagcgtgaattcagtgaattcagcttatcagcagctgctttcggaaggttatttatatgcagtcgaaagaaaaggctttttcgtggaggaaattgatacggtttatcatgaagaaacgccttcgctctcattgcctgaagatttaaaagagcgggagccggataagagcggctggatttcgttttctcatatgagcgtggatacggcgcattttcccctgaaaagctggttccgctgtgagcataaagcagccgcccgttcatttcatacactcggggaactcgtccatccgcaaggcttatatgaagtccgtgaaaccatttcgcggcttatttccctgacaaggggcgttacatgccgcccggaacaaatcgtgctcggggcgggcacgcaaatgctgacgcagctgctgacggaactgctgccaaaagacgcgctgtacgccatggagaacccgggatatatgaggatgtaccggctgctgcaaaacctcgggaaaaaggttgcgacgatcagccttgatgaaaaaggcatgtccatggccgaaatcgaaaaacgccggccctgtgtattgatcaccacgccttcccatcaattcccctcaggcgtgatcatgcccgcttcccggcggattcagcttttaaactgggccgccgaacagaacggccgcttcatcattgaagatgattatgacagtgaatttaaatatgacgccgatacgataccggcgcttcaaagccttgaccggtttcaaaatgtcatctacatggggaccttttcaaaatcccttttcccaggtctgcgcatcagctatatggttctgccgcccgggcttttgcggacgttcaaagagagagcgtatgacctgcatacgtgcagcacgcttgcccagctcgcgctgaaagaatttatcgactcaggtgaatatcagaaacatattaaaaagatgaagcagcattataagaacatgcgggaacgcctcatttcggctttagaagaaatattcggagaaagaatcagtgtaaagggcgccaatgcggggcttcattttgtcactgagtttgactgcgcccgttcagaaaaagagattttggcacgggcggatgcagaacagctcgatctgtttgcgatgagccggttccgtctgaaagcaggaggcgattcaaataagccgcagctcattctggggttcgcccgcctgaaggagagcgatattcaagatggcgtcctcaggctttaccgggcggttttcgacgcataaaaaaacccccggaattcggggacttatttaccagcggtccggttctgtctgcaaaatcgcctccagcaggccgggaaacgccgcttgtaaatcatctttgcgcagggaataataacggtgcttcccgtctatgcgcacttgggcgatccccgcttcccgcagcactttgaagtgatgggacagcgttgatttggcgacccggacatcagcgcaggtaccgcacgttttttctgttgtttccgccaattgtttgaccagctctaagcggagcggatcactcagagcatgaagaacctttgtcagctgtaagcggtcggtttcaggatggtttggaatgttcatgagtcaaatgtaacacataaaagcggcgggtgacaatttaggcggtgagggtttttcctttaccattcactgcgaaacatgttacagttagttcgataatattcgaactataacaaataaacccaatcaggaggaataacaatgatcgtcttacaggcttacatgaaagtaaaagcggataaacgcgaggaatttttaggagaagcacaatcacttgttcagcattcacgcgcggaagaaggaaatgtgcaatacgatcttttcgaaaaagtcggtgaggaaaatacattcgttatgcttgagcaatggaaagatgaagaagcgatgaaattccacaacgcaactgaccatttccaaggattcgtggcaaaagcaaaagaagtgctgagtgcgccgcttgacgtcgtccgcacagaactgtcagagtaacgaaaggatgaatgacatgaacgaagtccttcaaatattaacagaccaccgttccattcgcagctacacagatgaacccgtatcggatgagcagctggaccttatcatccaagcaactcaggcagcgccgacttccattaacggccagcaatttaccgttattgcggtgaaagataaggagcggaagaaaaaaatatccgaattggccggcggccagccgtggattgaccaagcgcctgttttccttttattctgcgctgattttaaccgcgccaaaattgcgcttgaagaatataatgatacaccgcttgagatcacgaacggtttagagtccgttctagtcggagccgtagatgtcgggattgcgctgggtacggcaacggctgcggctgaatcaatgggactcggcactgtgccgatcggcgccgtgcgcggcaagcctgacgaaatcattgaattgctgaaacttccgaaatacgttttcccgatttccggtctcgtcatcggccatccggcagaccgctccgcgaaaaaaccgcgtctgccgcaagcagccgttctgcatcatgaaacgtatcaagaagaagatttaagaacccatatcgaggcctatgacaagcagatgtccgaatacatgaaaaaacgcaccgacggacaggaaacaagaaactggtcacaaggcatcacttcctactataagcaggtttattatcctcacattcgtgaaatgcttgaaaaacaaggatttaagacggataaataaacgtatcagcctgtcggaacactccggcaggttttttctatttctcaaacaaaagcgttgacactatgtaaaaatttttgttaatattttcatcatatactcattggttttctgtgaaccgatgggttttctattgtgacgaaagaaggaatctgggcttatgaatgataagaaaacggatattctgctggcggcaaggaagcttttttccgggaaaagcttttcgtcggtctcgatgcaggcgatcgcagaggagtgcaaagtctccaaagcatctttgtataagctgtttgaatcaaaggaagacctgctcctggagctgctcgattttaaccagaaacagatggtagcggccgcttcattattaaatgaagaaacgagcctctcccctgaggaacggtttgccaaaaaactgatggctgagcttgaaggcttcaggcgcaaccagcagttttttaatatgctgatgtacggaagcccctcttccattaatgagcgggtaaaacggcatattcacagggcccgctccacctttatctgctggcatcgcgattcactgattcagacgtacggcgaagacattattccttatgtatgggagctggtgatcgtcctgcaggggctcctgagagaatgcatcacgctgattaagctggaaaaagaaccgctcgccctggagccgctcacggactttatcatccgccatctcaatctcatcgtcgaaaacaggaaaaccgaaacggctttgcctcaggagatgattgacctttataccgcctccgcttcctcatttgagccaaaagacaaaaccgtattgctggctgaaagcctgaaggaactgaaagaagccgtctcagcccttccggaggaaaaatatgatgccgcaggactcgcttccgcggcggttatgctggagaaagaatcagcggacaaacagccgcgggattttcttataaaagcgctcatcggttatttggagcaggccggaccgctgcaccagccgcttgcagccgttaaaacattgctcaaactataaagaaagaaggaatcagcttgaataagagtattaaaactgcaccatacaaccgctctgtcattgtcgggattcttttggcgggagcgttcgtcgccattttgaaccagacactgcttatcacggcgctgccgcacattatgaatgacttcaatatagatgccaacaaagcgcaatggctgacaacgtcgtttatgctgacaaacgggattttgattccgattaccgcatttttaatagagaaatttacgagccgcaccctcctgatttccgctatgagtattttcacggtgggcaccattgtcggcgcattcgccccgaactttccggtgctcttaacggcccggattattcaggcggccggcgccggaattatgctgccgctcatgcagacggtatttctcacgattttcccgatggaaaagcgcggccgcgccatgggtatggtcggcttggttatttcgttcgcgccggcgatcggcccgacgctttccggatgggcggtcgaagcattctcttggcggtctttgttttatatcatcttcccgatcgcagtcatcgatttgcttttagcgattattctgatgaaaaacgtcacgacattacgagaaacacagattgatattttatccgtgatcttatcgaccctcggattcggcgggctgctttacggcttctcaagcgccggttcctcaggatggaccagtactgaagtgctgacttcgctgcttgtcggagcggccgcgctgattttctttatcgcaagacagatgaagctcaaaaaaccgatgctggaattccgtgtgttttctttcgggattttcagcctgaccaccctgctcggaacgcttgttttcgcgctgctgatcggaacggaaaccattctcccgctttacacgcaaaaagtccggggcgtctccgcgtttgataccggattaatgcttttgccgggcgcgattgtgatggggatgatgtctccgtttatcggccgggtgtttgacagaatcggcggaaaaggccttgcgatgaccggattcttcatcatcctgctcacgtccctgccgtttatgaatctgacggactcgacgtctctcatttggattgtcgtcgtttataccgcacggcttttgggaacagccatgattatgatgccggtgacgacagcgggaatcaacgccctgccgcgccacttaattccgcacggcacagccatgaacaataccgtccgccaagtcggcggttctatcggtacggcgctgctggtttccgtgatgagcagccaggccgcgcacgccaatgcgtcaactccggcaaacgccgccctgcacggcatgaatgcggcctttgtcgtagccgcctgcatcgcgctggccggcttcctcctatcttttacattgaagaaaaaaccgcgtcagcccgagcagcagcaggccgttacgcggtaaaccaaaaagaacccgatcacgtatgtgaccgggttctttttttacttctcgattccgtcttttacttctttcaccatttgcgccatggattccaggccgcctcctgataaataccatgtagctgaatcaaggtagacaacatggttgtttttcacggctttcaccgattttacataatcattttcaaccacttgttttgttgaagattttgtgccgatcgctgttccgcggtcaacgacaaacatgtaatcagggtttgttttggcgatatattcataggaaatgctttgtccgtgcagtgaggcttcgatgtttttgtcagccggtttgacgccgaacacatcatgaatgaagccgtatcttgatttagacccgaacgcgctgattttgccgtcgttcgccatcaccactaatccgtttttatccgtgctgcttgtctttttcttcagatcggcaatggatttgtcaattttcgcaagcttatctttcacttcattttctttgttaaagattttgccgatcacttcggtgttttgcttgaatctgtcaacgtagtttgtatagtcatcatcaagataaatcgtcggcgcgatttttgagaactctttataagaatcagattgtctgtgggcgataatgattaaatccggatcaatatccgcgactttttcaaaatccggttcttttaaaccgccggtattggcgtatttatcactattatatgaagataagtattttggaaggttttgtttcggaagtcccgccacgtgatcctgtaaaccgagttcatccatcgtatccagcattccgaagttgaatacgacgacttttttcggattcttcggcactttgactccttctttgttcagatcatctttgattgtgattgtttcttttgatttgcctgatgttttgtccccgtttccgcatgcagaaacaacaaaaatcgtaactagcgcaatgaatagcaatgcgaattttttcatgactttcacctcatctggtttttaagaaaagtacacaccgatccgctgactgtcaatctcttgaatcgggatggtcatatcataaatatcttcaagcacggaggtttcaatgatctcttccgccggcccttctttgacgatccgtccgtttttcagtgcgacgatatggtctgaatatacggatgcgaagttgatatcgtgaatcactacgacgaccgtttttccgaagtcttccacaagccgcttcaacagcttcatcatttcaacggaatgcttcatatctaaattgttcagcggctcatcgagaaaaatatagtccgtatcctgagcgatgatcatcgcgataaacgccctctgacactggcctccgctgagctgatcgaggtatttatcctttaagtcatccagcttcatataactgagggcctggttgatatgcacccaatcttcatccgtcagtttcccttgggaatacggaaatctgccgaagctgaccaggtctttaatcgtcagtctgatattgatttggttcgtctgcttcaggatgctgatttttttcgccagatcgttgcttttacaggccccgatctcttgcccgtcgaccgtgatttctccggaatccgtcttaatcagccggctcatgatagacagcagcgtgctttttcccgcgccgttcggaccgataaacgaggtgagcctgcccttttgaatggatagagacgttttctcaaggacggttttccctccgtattgtttgcttacatttttgacctctaccatgatttattctcctttaacagcagatagataaaataaatcccgccggcaaaattaatgatgacgctcagcgtcgtggaaaacgtgaacactttctccacgacgaactggcccccgacgagcgcgacgatgctgatcaggacggaacccgcgattaaatacgtgtgcctgtaggtttttaaaaactctctcgccagattgacgacaagcagtcctaaaaacataatcggcccgacaagagccgtagagacagacacaagaatggcgacgacgatgagcatctgtttcacaagcttatcgtaatcaatcccaaggttgacggcgtgctccctgccgagcgacagcacgtcaaaaaaccgcgtgaaccgccagacataaatgcctgtcagaagaaagacagcaccggcaaatcctaaaagatcggtgttgatattgttaaagctggcaaacattttgtcctgaacaacctggaactcattcggatcaatcagcatctgcataaaggatgacagactgttgaacagcgtgccgaacacgacaccgacaagcagaaggaaaaacacgttccgcccctcgcctttaaacatgagctgatacaaaacgagtgacaagagcaccatcagcccgacggagatgacgaaattaagatttttgttcatcatgacgatattcattgaaccgaacaggaacacgatgacggtctgaatgagcatatacagggaatcgaggcctaaaatgcccggtgtcagtatgcggttatttgtaatcgtctggaagatgaccgttgaaaacgcgatcgctccccctgtgagcatcatggcaagcactttgaagcatcgtctcggcagggagtattcccaattgcccagtccgtagaacagaaagaatccgatacatattatggcgagcgccgccagcagcgtaatttttttattatgactcatatgcttttctccttaacagcatatacaggaagatgccgctgccgataacaccgaccatcaggccgatggaaatttcgtacgggaagatgatcacccttcccaaaatgtcgcaaaacagcacaaaaacagcgcccaagagagcggtgtgaggcaggctgctcctcaggttgtcccctttgtaaatcgacaccatattgggaatgatcaaaccgagaaacggcagcatcccgacggtcaggatcaccagtgaagcgatgagcgacacgataatcagaccgatattgacgacgcgtttgtatttcaggccgagattgacggaaaagctctctcccattcccgccaccgtaaatttatccgcatacacataagcgatgatcaccagcgggatactcagatataaaagctcataccggcctttaacgaccagtgagaaatctccctgcagccaagatgacaggttttggatcaggtcgtatttatatgcgataaacgtggcgattgagctgacgatgttcccaagcattaaaccgacgagaggaataaaaatcgcatcattgaacttgattctctcgaggattttcatgaaaaggaaatttcccgccaacgcgaaaataaaagcgatagacattttcacaagcgggctcgctgacgtaaaaagcattaatgaaatcaaaattccgagccttgcccagtccatcgttcccgcagtcgtcggcgatacaaatttattccggctgatctgctgcatgattaatccgcagatgctcaggctcatgccggcgatgataatgctcaccaaacgcggcagccggctgtcaaacaatgtacctgcctgttctttatttaaatgaaaaatatccagcggcgacaaatcttctacaccgataaatatagaagtacacgccaaaaccgccagtagcaaaagtaagtaacgtagcttcatgctgcctccctgcacccatcacaaacggtatgactgattgccaaacaactcccatatatccccactcgtaatgattatcattatcaacgacaactataatcttatcatctttccaagcgcagtcaatacagttttgctttcaaaaacggtcatccgcgggccgtacactaaattgtcttacaatcagtctatcaagaatttgcaggattttctataaccttcatttggctgcttatcattttttgcacatgatgacacgcttgcgggaaacaaatctgacaaacagcggcaaaattcctccacgaaaatacaaatgttctccccacatagaaaaaatccttgatttacatgtttgaaagagagataataaaaattaaatttgtgagaaaatttaaatattaggggatgtaaatcatgaaagttgtaaaattcggaggcagctctcttgcgtcaggagcccagcttgagaaagtgtttcaaatcgtgacggctgatccctcgcggaaagccgtcgtcgtatcggcgccgggaaaacgcttctcggacgatacaaaggtgacggatctgttaatccgctgtgcggagcattatttgcaaaatggtgcagcgcccgagcttgccgaaccggtcattgaacggtacgccgccatcgcgcgtgagctgaacctggatttctctattatagaaagaatccgcagtgacctattcgctctcttaaacagcagcaaagccaatcccgatcagtatatggatgcggtgaaagcgagcggcgaggacaacaacgcgaagctgatcgcggcctacttccgccggcagggcgtgaaagccgaatacgtaagcccgaaagaagcggggctgtttgtgacgaatgaacccggaagcgctcaggtgctccctgagtcttatgatcatttgtaccgtctgagaaaccgtgaaggcttgatcatttttccgggatttttcggttacacgaaggagcatgagattgtgacgttttcccggagcggttctgatattaccggctccattctcgccagcggcttaaaagccgacctgtacgaaaactttactgatgtggacgccgtctattccgtcaacccgtcaatcgtgcggcatccgaaagagattaacgaactgacgtatcgggaaatgcgtgagctctcctatgccgggttttccgtttttcatgatgaagcgctgattcccgcttttcgggccggcatccccgttcagattaagaatacgaataatccggaggcgaaaggaacgcgcgtcgtcagcagccgtgacaatacgaacgggccagtcatcggcatcgcaagcgacacgggcttttgcagcatttacataagcaaatatttaatgaaccgggaaatcggtttcggccgcaaagcccttcacattttggaggaagaaggattgacgtatgaacatgttccatccggcattgacgacatcacgatcatccttcggcacgatcagatggactcagaactggaacacaggctcgtcacccgtctgaagcaggaacttcaagcagatgaagtcacagtcaggcacaatctggcgctgattatggtcgtcggggaagcgatgcgccataatgtcggcacaaccgccagggcatccaaagcactgtccgaagccggcgtcaacatcgagatgatcaatcaggggtcatcggaagtcagcatgatgttcggggtgaaagaagaacaggaaaaacaagcggtgcgggcgctgtatgacgagtttttcgccggagtcttactcccataggacaccgcctcttttttctcttgtccactaatatcccttacaaagcagcttcttttacatattgtatggtatagacaatatggaggtgaagctcatgtcaggatattctggaatcagctctttcgctttgatcgttgttttatttatcctgttggttattgtaggtactgcctatgttggcggtttctaagcatcactccgtctatatgaggacgctgcgggttttgacctgcggcgttttcttttgttttccgccgctgtccaagtccggccgcgcaaaaaaaagactgccgggaacattcccgggcagtcttttcctttgttcaggttattttcttctcacgtcattcctctttcagctacatggaattcagcctgatctgtctggcctgcacctgtcactgtaaaaatcgcggcggctgctaaacaaataacaaaccatttagatttcaatttcatacaaaccctcactcctttgtatttgtttccttgcctcttcgactttcagaaaatagtcagaagaaatcttaaagcaattttgttcatagtaatatttagctgcttctagtgctaaatcctctatatcggcgtataaatttttatcttccaggtaacggaaacacgcgctgattgtttcctcatccggtttcgcctgatacagagcctgcagccattcgaattttaccgtgtaaacgggatcgtctgtttctttagcatattcatatccccgcttgtgatattccgacgctttttctttttttccgagtttaaagtaaatgagtgtgattaggaaatatgcttgaggaagagaattgacgattctttgtgattcaaatgtatcaaccgcccgttcaaagtacggaatcgcttcgccgatgcggtcctgattgtagtagcacagtccgaggttatacagcgccctcccgacaagctgcgctttttgttctttttcggccatttgcaaagcgtgctgaaaatgtttggccgcctgttcaaagcgcctttcatccattaaattgacgccgaatacaaaatggcattgaatgatcctgacgttatatgtgtcctgctctacgtaaatttcataagcgttttttatatgtatcaaagaaaaatacgtttgtttcatatgataataagcttcggccactttaaaataaaactccgcccgttccacgtggtccgatacgaaggccagttttttctcagcttgtttataatacgtaatcgctgagataaattctcttttatcaaattcaaacatgcctttgaaaaagttgacgtaataatcgagaagccctttgaggccggcctggctgttatcaatgttatcaagaatttccgacagggtcggctggtcttctatcttcagtttttccagcggctccaagtagtccagcatcagctgatggcgaaattccatgagggaataataaagcactaagtttgaatcaggctccatacggtcaagctcttgtttgatctcggccttcaagatctccgcatccggcacgctgaatgttctgatgtatcgataccactcgttaattttctgcccgactgctgaagaaggaattaacccgctcttcattccttcaccctccccatccaagacctgtttaccagttattttatcacgtttccgtgtctttccatcccgaaaaacacgcaaactttgtttcggcagagcgcaattttccgagtgaagataaaacagccggtagccagacgggactgccggtttcaagatgattcatgtatcgtattcagcggaaggcggattgtaaacgtcgtgccttttcctttttcgctggcaatatctatcgtgcccttgtgcatttcaacgagctgcctgacgatggacaggccgagtccgtattcgccgtatgccgtattcgtccgggacacgtccgccttataaaaccgctcccatatatgctcaatttcctctttggagatgccgattccggtgtcttcgatctcaatcaccgtttctttatagccttcatacccgcgcagcgtgatgtctccgttttgcgtaaattgaatgctgtttttcgtgatgttgacgagaatctggatcagcctgtcataatcggcgaacactttgacgccgtcctccgcctgaatccgcagctgattttgtttttcctccgcctgctgattgagatgctctttaataatttcaaacacctcgatgagcggcagactgagcttgtccagtttgatttgctgggatctgattttttcataatccagattttctttcacgagcctgagcatccgcttcgtttcttcactgatcagcgagaagcatttctctttatctttttccgggatggtgttgctgttaagcccctccacaagtccgttaatggtcgtcaaaggcgttctcagctcatgggagacatcggcgataaattggcgcctccgtttttccaggcggtcaatctgctctctcgattgcttcagatttttggccatgatgttgaaatcggacgccagcatgccgatttcatcgccgccgctgttcttgagcgaaatatcgtaatccccggatgccacttttccggtcgcatcccgcaatgtctgaatccgcttaacgtgaaatttagataaaagccagctcagcagaatcgtgatgataagggtgctgataatcgcgtaaatcatatagcggttgacctggctgatcatctgctcgacccctctgacgggagacacgagcagcaccgcgcctttaaattgatcgttgatcaaaagcggttttgcgacaagcgatacttccaagccctccgtattaaaacggttcatctccgctctgatctgaacggttttcccttgcttcagcatgtgccactctttacttttgagcttctcgcgcggcggcatatcgtcaggaaaaaagtaaggccgctgatgttcatcaaaaataataaacctggtctcgcgcgtttttaacatgtcctgatacggatacaggcggcgcagatcaagatcgcgtccgttcagctcacttgtgatctgctgggcgtaagaagacagctcatccactttattttgatacgcaaaatctttcacaaagtgcgaaaacagggaaatgataatgaaaaaggccaaaatcaaaatgctgacatggcttaacagcagctgatataagtatttaatcctcatcaaatttgtatcctacccccacaccgtgtataaaaacggtttttcctcactggacagttttttgcgcagccgtttaatatgaacatcaaccgtacgttcatcgccgtaaaattgatagccccacacctgctcaagcagctgctctctcgaaaagacctggcgcggattttgtgcgagataaaagagcagatcgaattccttcggcgtcagattctcgacaggctttccatgcagaaacacttcccgcgtcttcttattgattgaaaaacacgccgtttcgatcaagtcgccgctttttacggcctgccccgtcgcccggtatcttctgatcaccgctttaatccgcgctactagcgtcagcgggctgaacggcttggtgacatagtcgtcggctcccatttcaaacccgatcacctgatcagactccgtgtcctttgcggtcagcataataatcggcacactgctcgtctctcttattttccggcagatcgtcactccgtccatagatggaagcataatatccagaatgaccaaatcccagtcctcttccgtgaaccgctgatagccttccactccgtcatggacaaattcggcttcaaatccttctttaaaaaagaacatttccgtcatggtgcatacgcttatattgtcttctatcattaatatcttcattgggtcctccgtttatcttgacgcttttacttataatagcaccattttacccggatattttcgcgtttcacaattgttagtttttatttcatcacccggaaatagtttgttcatatttttttcatacatttctcctactatatacatatcggataaccggttctaaagaaggctggttttacaagatctgacacccacacggaggaacagacatgaactttataaaaagagccttttggagcatgaaggcaaaaaagggaaaaacgtttttgcagctggttgtgttttcagtgatttgcatttttgtcctgtccggtcttacgatccagtcagcggcaaagaaatcaagcgaactggcaaggcagcagctcggcgggagcgtcacactccaggctgaccgccaaaagcaaatggcgcagcagcaaaaagacggtgaaaagaggacgtttgaatcaacgccgatttccgtctcggatgccaagaaacttacatctttacagcacgttaaaaattacaacttcctcacgacagcgtcagcaaacgcagaaagctttgacgcgataaaaagctcagacgaatcagccgataacagttccggcggaagccgttttcaaggcggcggaagacagatgatttcagcggatatttcggtcgaaggcgtgctctctacggcgctgcttgatgatttcacaggcgggagctcaaaaatcactgatggccgcgccatcacaaaaacagatgcggacgcaaaagtcgcagtgatcaatgaaacgctggcagatcaaaacaagctgaaggtcggcggctccattacagtttcctcagcagcggatgattctgtgagtacaaagcttaaaattgtgggaatttataaaacaacatcatcaggagacgatcaggcagagcatttttcattcttaaaccctgacaataaaatctatacgccttacaccgcagctgcggcgttaaaagggtctgataacaaaaacagaatcagctcagccgtttattatatggatgatgcaaaatatattgactcattcgttgcggctgcgaaaaaaacatctatagatgataaaacctacacgctgacgacaaatgatcaggtgtatcagcaaatggccggcccgattgaaaatgtcgcgtcattttctaaaaacgtggtgtaccttgtatccatcgcgggcgcggtcattctcggattgatcgtgatgatgtcgatcagggaacgcaagtatgaaatgggtgtcttgatggcgatcggcgaaaagcgctggaagctcatcggacaattcttaacggaaattctgattgtcgcggttatcgccatcgggatcgcatccgtcacgggcagccttgtggcgaatcagctcggaaatcagcttctttcccagcaggtcagctcagccgatgattcccagcagcaaacaagcggctggggcggaggagaaatgccgcggggagacggcatgttcggtcagcattcatccggtgcagatgtcatcagtacaatgcaggtaaacgtttcgctgaatgaccttctgattctcggcgggatcggcgtcgcaattgccgtcatcgccacattactgccgtctgtatcagtcatgcggcttcaccctaaaacgatcctgaccaagcaggaataagaggaggcagcataatgagcctattaacctttcaacagatcggctactggtaccaagataaatcacagccgctgtttcaggatataacgatcagctttgaaaaagggaagttttatacaattgccggcgcctccggaacgggaaaaaccacgtttctgtctctggcgggcggccttgacacacctaaagagggaagcatcctttataacggagaagacatcttcaaaatcggattaaccaaattcagaaatcaatatgtctctatcgtctttcaatctcatcatctgatcccgtatatgacggcgctccagaacgtcacaaccgcgatggagattaccggatctaaggagaacaacaaagatgcgtccgcgctcagcatgctggataaagtcggcatcaccgaacagcaggcccgtcagcgggtgctgacattaagcggcggacagcagcagcgcgtttcaattgcgcgggctttctgctgtgacacggatctgatttgcgcggatgagccgacgggaaacctcgacgaggatacgtcaaaggaaatcgtccggctctttcaggatctggcgcataaagacggcaaatgcgtcatcatggttacgcacgacgaacaaattgccaaagtgtctgatatcaacatccgcttatcaagaggaagtttcacggtcaaagaaaacggcacggccgtttcctgataccgcgcccctgccagcgcagacaggggcgcaccctatatccccctattcaatagaagtgaacgtaaaaagagccagggctgcatcccctcgctctttttatttatatcagctgtaaataacggtcaatatttgattgtccggctgctttgatcaattcttccgcctttttctcttctcccggcaaagcgagccggagcttgtcttcaatgtctttttcagaaagaccgtttcccggcgctcccctcggacagtcgatacgtgcttcatagacatgaccgccggaaaccgtgacccgtacaattgtaaaacggcccttcggaacggcgttgtcagccggctgaatttggtcatcgcagctgcggtgaatccgctcaaatcctttttgaagggattgcggaatcggctcggatgtgaaatgttcaactgaaaaatccttaccgtgcaaagctaaggtgatcacatattctacgctgaaccgacccgcttcgcctgttttcggacgccgttctgtcaatgcggcgtccccgcccggcggataaatcacgtcaatccgttccgtttggccgaaagtgagaccatgttcggccttcagcttgagaatggcgtccgccgcatgatgggccgccgagcaaaacggataaaccttaaaccaaagtcccggactcacgatccgccaagggtttccccacccgtttacaagcagggtttctgcccgttcaagatcgccgtacagtccgaaaaaacctttctccccgtcgagcgcatgagctgagccgccgaaaccggcctttgcaagctttacggcgaacaccccggcttgagcggccaggccggcgtggagcggcttcatttctgtcccgaattgcactctcatgcctccggaacgggcagccgcaaacccgattgctttctgtaattgggtttgattcagattctctgcgaatccgacggcgcatgcggccgaaatggcacctaacgttcctgtattgtgccagcctttctcgtaatgatcccttccagctgactcgccgagccgcgccatcacttcgattcccgtcacataagcaccgagaaaacggctcttgtctatccggccggctgatgcggctgcaatcaaagccgggaggatgaccgcgctcggatgtcctcttacatcagaatgaacatcgtcaaaatcaagcgcatgtgcgatgaagccgttaatgagcgcggattgggacggcgtggttttttgatttctgccgataagcggcgctatcggcatcccgccttcttcttcggccagttttaccagcttttcaactcctgtatcccgtctccccgcaaaagcagccgctgtaaaatcaagcagtcctttgcgcgcttctttcatcgcttcggcggatgtttccggcacagacgacatgacggcctgagcaagtccggccgtcagattttccgtattcattccgtctgctccaatacattgacggcaagccgggcgaaaaactcagccgctttcggaagcgctttttcgtcgagtgtaaaggctggatggtgccattcttctgttccgtttgttcccatccagacgaagaagccggggattttttcttgatataatgcgaagtcttcgccgccgggcgactgttctgcccgaacggtttgaagtccgaggctttcagccgtttgttccgccgcctgtatgaatcgggcatcgttcatcactgacggcaggtaaggaaaccagcggaagtcagcctctgccccgaatccggccgcgattccttcggcaacccgcttcatatgtttcggaacagcgtcccgcgcttctttttgaaacgtccggacggttccttccatttcaacatggtccggaatgacattccaagaactgcccccctgaactcttgtgatgctgacgacggcattgtgaagcgagctgatgtttctgctgacaatcgattgcaggccgccgatgatctgccctgtcgcctgaatcgggtcaatgctgttgtcggggattccggcgtggccgccttttcctttcacggtgatttcaaagcggtcgacactcgccataagcgggccttctttcagaccgaccgtgccgacggggaggtcaggtttgttatgcatgccgaatatcgccgatacaccgtcaagcgcgccggcttcaatgacctgtcttgctccggcggcgatttcttccgcgggctgaaaaataaaccgcaccgttcctttcagctcatgctttctctcatttaataagaaagccgtgccgaggatagatgccgtatggaaatcatggccgcatgcgtgcatcacgccgctgttgcgcgaagcaaacggaaggtttgttttctcttcgatcggcagtgcgtcgatgtccgctctgacggcgatgacggggccgcttttatctcctttgatttcagcgatcactccggtttgaagtttcggcacatcaagaaccgtgattccttcttcctccagccagcggcggattttattcgtcgtttcgaattcctcgcctgacagctcagggtgttcatgaaggtcgcggcggatattgattaaacgtttgtttaatgattcatacgtttcatttgccatttcttcttcttcccttcttagacaagttcggcaggctctcccacttgcttaatgaattttttcgtccgttcgttctgcggattgtcaaacagctcctccggtgttccctgttcgatgatgcgtccgtccgccataaaaataactttgtcggctacttcacgcgcaaaagccatctcatgcgtgacgatgatcatggttgtctgtttttcggcaattgatttgatgacttggagcacccctgctacaagctcagggtcaagggctgaagtcggttcatccagtaaaatcgcgtgaggatcaacggccaaggctctcgcaatcccgatccgctgctgctgcccgcctgacatcgtaatcgggtagctgtccgctttgtgttctaaaccgacttgccgcagcaggtccataccgatctgttccgcttcttttttcggtttcttttgcgcggtgatcagcgcctctgtcacattttgcagggcggttttgtttttgaacaggttgtaattctgaaacaccatcgccgtctgctggcgaagcttgtgtacgtctttgcgcgaataggacgctgcattcagctttgcatcgccgatttcaatgatgccgtcatccgggcgctccagcagattcagacagcggaggagcgttgattttcccgagcctgacgggccgatgatggccgtgacttcgccgcttttgatctcaagatcgatcccgtcaagtacggtaagatctttaaatgcttttcgaatatgtctgacttgtatcatcctgagcctcctcctatgtgcgataaggcttgctgatcgcccgttcgagcagatcctgcagcacactgtaaataatcgtaagaatccagtacatgaccgcgacggctaaatacgtctcaaaatatttgaggttgcccgatgcgtacatttttccttgggcgaacatctccatcacacctaatgtaaaagcgagcgatgtttcttttaacaggccgataaacgtatttcccgtcgcgggaagcgcgtttctgacggcttgcgggaaaatgatccgtctgtacgcctgggattttgtcattccgacagacagacaggcttcaagctgcccctcatcgactgagttgagcgcagcgcggaagatttcagccaggtaggcggcatttttcaggcttaacccgataatcgccgcagttaacgccgtcatcttgctcatcccgggaaagagctgaggcaggccgtaataaattaagaaaagctgcacgagcgtcggcacgccccggaaaaatgaaatatacacctttgacagctggtgaagcacaggaatacgatttttgtgataagcgctaatataaggccgccgatcacggcaaataccatggccgcgacggccattagtaatgtgatcggcaaggcttcgattaacgcgggaaaagctgaaaacataaatccccaatcaatgctgttcattctcgattttcaccgccgtttcttattgctttgcttcctttgtgatatcttcgttaaagtacttttcagacagctttttcagcgtgccgtctttccgcaggtcttcaatggctttgtttacttttttgcggattttatcgtgagccgcatctttcgcaaacgggaaagcgactttttcatagacaatcgggtctcctgctaatttcagaggcagaccggtctttttgatctgggcgatcaggacgctgcggctgtttacataggcgtcaacccgtccgtaagccacgtctttcagcgtaccttcttgtgtttcatatgtttttatgttgatttttttatccgggtccttgctctcaaggtttttcgcgtggtttgagcccagaacggccgccactgtttttcctttcagatcattgactgatttgatgtctttgttatcgtttttgacgacgacttgagtgcccgcatacgaatacggttctgtgaagttatacgttttcttgcgttcgtccgtgacagcgacctggtttgaaatggtgtcgagtttgccggtctggagctcgcccatcagtccgctgaactcaagcagcttccagtccagtttcatgttgatttttttcgctacggcttccattacatccacgtcaaagcctgtcagcttgccgttttctttatatgcgaacggatagctttgtcccgtagcgccgacatgcagcacgttatcgccgccttcgctttcttttccgtttccgcatgctgttaagaccgccaaaagcgcggcagacagcagcaaagcccatgttttcttcttcattgaaatcccgccttttcctattaaaatgttaatcctgcaattgtttttttaaatagatggtgatgtggccttttcctaaatccttttcgcctgcgcggacgtagcctttccgctcgtacatgccgatcagccacggatgcttgtccgctgtgcccagtgacacgaaaggcgcttttaatgtatcgcggagcactgtgttctccagccactccagcatgtctgagcccgtccctttttttccggtttcaggatcgacggcgaaccaccaaatatgagggacaccgtacggcccgggattcggcccccacggcatccgcagagaaatcgtcgccagaatccgtccgtcttcctccaaaacgtaacaggcgtttttttgtatgttattcaaaacgagctccttatccgccgttgctgcggcaaagttgatgccgagcttgcggatcggttcatacgcccgcagtgtcagtgaaagcagctcatcagcgtctgcctccgttgcgagccggtattgtcttgacatgatgagccctcctttagtcggcatatcggtttgccggtttttccagtccgaaatgttctctgagtgtggttccttcatactcttttctgaacacgccccgttcttgcaaaatcggaatcactttgtctacaaaaagagtgagaccttcaggcaaaagcggcggcatgatgttgaagccgtcacaagcttgttttccgacccattcttccatcttatcggcaagctgttcaggcgttccgacaaagatatgatggcctcttgaacccgccacatatttgtacagctcgcggatggtcatgttatcgcgtttggccatctcctgaacgagcttgaaccggcttttaacggcattcgacgcatccgcatccaattcaggcagcgggccgtcaagcgggcaggcggaaaggtcgacgccgcccagatagttttgcagaatgttcaggccgacagacggaatgatgagatcttggagctcttcatattttgcctgcgcttcttcctcggtatcggcgataacgggaaatatccccggcatgatcgcgattttttcaggatcacggccgaaagaagccgcttgttctttaatagattgatagaattcctgcgcggactccaaatgattttgcgcggtgaaaatgacctccgccgttttggcggccagcgcttttccgtctcctgatgatccggcctgaataatgaccgggcgcccttgaggtgtgcgggcgacatttaacggccctctcacggagaaatatgttcctttatggttcaattcatgcattttttctttatcgaaaaatgctcctgactctttgtcacggataaaggcgtcttcctcccacgaatcccataatcctttgacgacttcaacgaattcttccgcgcgctgatatctgagatggtgctcaagatgcttttcgccgctgaaattaagcgcggtcgattcaatcgaagatgtgacgacattccagcccgctcggccgttggaaagatgatcaagcgatgcaaattgtctcgcgatatggaacggttcgctgtatgtggtagacgcggtcgccgtcagaccgatgcgggatgtgacctgagcgagcgccgacagcagcgtaaacggctcaaagcgcgtcagcacattcggatgtgatttgccgtctattgataaactgtccgccaaaaacagcatgtccaatttcccccgctcagccgttttcgccagttctttgaaataatccaaattcatgctcgcgtccgccggtgcctgaggatgtctccaagaagcgacatgatggccggtgcccgcgagaaacacaccgagtttgatttcttttttctttgtcatgatggatctccttctattctgaaatacggttcggaaaatattaacaccactaaacctatatttcctagtaattttataagaataaatcaaaatgtacaattgtcacgcaagtttgtcaatgcattaagacaaaaatcatgattttaaaaataacccggcgcaccgtccgggttatttcttcgaaactgtatagacggtccctttgacctttttcttaataacggcaatgataagcagcaaaacgggaaacagcacttgaaacggaagatgaatatagatcggcacaatgtttaagccttcattcatgtgttccgaaaaattgcttgcgatgctgatggagagaatcagcacccccaatccgaccggaaaggccagctgagacggatttttttctttaaacagcgtggacacacccacgacaaccgcatatgtaaaaaggctgactttgaaaaaaccgccgatgacgagcacgagcatgaaaaagacatccagccggtctaaaaactcttctactttaatcgtctgtatggtgctcagcagcggaaattgagagcggagcattaagttgacgtccagcacacaaatattaatcgccactgacatcgccaaaaacagcccgctgatgataatcgccagaaatccggttttcttcacctttttccgatcttttaaataagggaaaatcatgacaaacacgattaattcaccgaacgggatgaacatcgtctgtttaaacacggaataaatgaccgttcctgcaccctccgctaaaacgggctggagaaatctgaggtttatcgtgcctgagctgataatgaggatcagcccgacggctgtcagaaaatacataatgccaaacagcagctcgccggctctcgctatcacttcaataccctttctgaccgcaaatatcgcggcgatcatcagcatggcattcacaattaaaagcggcgtgtcctggtaggcgaaggtgacaagcatttcgccaaaatcccgcaatacgcgggccgcgatataagaaaaatagagaatataaagaagcgagaccgcccagctcagatgtctgccgatcagttcgttcatgtaatctctcggagaagactcaggaaaaaattgatacagcgcctgataaacgtagaaaagtccgagaccgataacgcacccgagaagcacggacagccatgcatcccgcccggccatcgtgcctggcgggatcaataacgaactgcccaattcaaacaaaatgatcataataaacagctgacgcgtgccgattttcgcattttccatacgcttcgctcctttctcctcaaatcaatcatgctcaagcttgtctgagagaggattattccgcaagcccgttcttctgataatgacttccgttttgacatctacggggagattggggaaatattcttcatcccacttccctttgaactttttccatttgtccggatgcttccgatagatcaggtctccgaagccgacgaagtcattcttacgggcttttatatcttcaattgatttggtgatatctttgtcaagctgcacgctgagcgccttttgcatcgtcatcagcacttgcggatcagacagatggaaagggtatctgacagcgtccaccagcccctcgacctgagcatgcacgtgaatatgcggttttccgttcggaaaagtggccgtcacctttgtattctggcgggtgacctgcagactgattgcgtgcttcacattcttccaatccgcattgatgaacgtatgcttgatcctattgagcagccatacagcccccacactgtcgtcatcctcaatccagtaatccagcctcccatcctttttgaacaccgccagtccgtccgctgacagcactgctttcggttcagtcgtctgcgtattttccatcgtaggaccggctttatcgtctccgtgcatttcataacccggaataaacggcgacccggccggagaagcgagatcaatcagaacgtcctgaaggctggttttaatgactctgccgtattgttcctgcgtgaagctgagcgtcttgttcactttattggaagggattttatcaatcggcgtcagcactttaataatgtcttcagccttgcaattatgcgcgatcaccgcggttgcggtcgtcctgaattcggtgtcgcggtcaagattgtccagaataaaactgagcccttcctctttcgccagcttttcactgaacaccacgagattcgtatgcgcaaaatagagccttctggacactttcatcgagccttttctcaaagcttccgtcatattgtctccggacaccgaatagacggaaaccggaggccggtctcccgctccgccgccctgcagaccgccggccacgtttcccggattgataatttgcaagtgaaggacgtattttcccgtttcggtccggtcaataccgatggcggagatcacagccaaatcagtcagctcccttttatcccagcatccggatacaaacataagggaaaccatcgtacaaaggataagtatccatttacgtcttttcattaccgtcgccctcttctacatctttattaaccatccctctggatgtctccggtttcggtctttgatgttccccttggcgcctgttgttttcctgcacgagcagttccggccttttttcatctgcccataacggagcgcggaggatggaatccttcagcccgcccggggtcaaaggagcgagcggggacatatacggaaaaccgaatgaacgcaggccgcacagatggacgaacatcatgataatgcccagaatcagcccgtaaaatcccatgaccgccgctgacagaataaagagaaaccggatcagccgcgcggatatcgccatgtcaaaagccggggtcgcaaagctggcaatcgccgtcagcgcgacgacgataaccatggccggggagacgatgccggcctgtacggcggcctggccgatgacaagcgctccgactatggaaacggcggagccgacaactctcggaagccggacacccgcctccctgagaatctcaaaagccacttccatcgtcagcgcttcaatcacggccgggaacggcaccgtctcccgctgagccgcgatgacaatcagcagctgcgtcggaatcatttcctggtgaaaggtcgtcgccgccacataaatccccggcgccaccagtgaaatgaagaaaatcaaaacccgcagcaccctgatgcttgtggcgatatcaaatcgtgaataataatcctcaacggattgaaaaaattgaataaataaggccggcgcgatgagaacgaacggcgttccgtccacgataatcgcaaatcgtccttccagcagattccccgccacgacgtccggccgctccgtatgatatacggtggggaacacagaaaacggcgcgtcttcaatgagctgttcaatgtagccggattccaggatgctgtcgatgtcaatgtgcttcagccgcttgcggacttccttaatcagctttttatcgcaaattccgttaatatacatcagcgcgacatccgtattcgtttcgtgtccgatctccattttttcaacccatacatcaggcgtttttacatacctgcggatcatggaaatattggtttgcagagattcagtgaatccctggcgcgggccgcggaaagagacctgagtgctcggctcttgaatggaccggtgctctcccccttccgtgctggcgatcagcgccttgtcagccccgtcgacaaaaatgagcgtgctgcccgccaccagcccggcataaaggcttttccatttttcttcctctttcaccccgccgatcgcaagcgttttatcgtatatcaggcagaccgcttgttccggctgaacggacgggatatcgattaaatcctccagaagggattggctgacaagctgttcgtctaccaaaccggcgatatacacgattgcggccggaagctcttcttttccgattttcagccggcggatgacgacatcggcactgttgccgaacctctcagacagcttcttcatattttgctttaagctgagggagatcggctcatcccgctctttgtccggctggctgtccgcttcttttctgccttcattgtcacggtcgttttgatcggcttttttttgtttcctctgcttaaaaaatggcggcatatcgcaaaaaacctttcctcgtttttttcatattcttcctgtacggcaaaagattatgcacggcggaaagtctgtataagttctgcgtaatcgaaaaggataaaaagggagagtgatgcgcatgaaaatattaggggtttcattctttttgctgactgcctgtctgatcatttcagtaacggtggatatgctgcaaggtttcagtttctatggagcggttcaaaacaacctgtccgcttttaaattgaccaccttctcagaatggctgatgctgtttttattcgccctctttttaatcagagaaatgatcgctttatataaatcaggtaaaaaagatgcctgacaggcgcaaggctgtattgtgtcaaaaaagaacacattcctccttctctcggagttcatgtgttctttttatttttccggcgcagattgttctcagatgacgatatttccgctttccgtatctgtcgcgtgcttcacaatgacgcctttgataatgcggttgccgatgattttagtacttgcggaggagctggtttggatggcggaagcagaagcggcggataggttgttgatggtattgcccgaaacgagggaattggaggctccgttcagatagatgccgatcgggctgcccgctgttcggttgatcgtgagcgtattgtctatgacttcatgcgtgcctgagttcagatacacggtaacgataagcggtgatgattcaaagcggttgctgatgacagaggttcccgaggatgttgaactgaatacgggatagtttttatagttcttaaagagattgcctttgatgacagccccggcgtcatttgtcacagatacggcataggactccgcggcgccctgatacgcattcggaaggagcgtatttccttcaataacggcatttccgcctgtgacccatatgccccggctgaacgatttcagcacattttgttttacaatgatactgccggccgacatgctgattccgtctgtcacctgattcagagtgttattcgtaaagacggcgttctccgaaagcgtcgcccgcatccccgtgcttcgtctcgtttcggaacgtccgttttcaatgacattgccgtcaacggtcacatcttctgcctgatagacggaaatgcccgtattttcaaattgattaattttgttgtgggtgacgaggacgctttttccccttacatctattccggtggaaaacccggtaatcagattgttggaaatgacggcactgctgctgtcctgtccttgtgacacaccttgtccggcgactgcggtccttgagccgccgtctgaccgaaagaagacattccccgtaatgacggtatgcgccccatacccgtagctgattgtgttatcggaatgatttccttcaattaacacattatatccgttaaaattggtgactgagcttgcggcgtttccggaaaagaagttgttgcggaccgtaatatgaagagcttcttcataatcaatatcgccttctccgtacgattcaatatcgattccgaatttcggagccgttccgttcccttgcccggcgtcttcaatcacgcattcttccaccgtaacggtattgcagccggtgattgaaatgttgttccgccttgactgcctgatctcacagcggcggatggtcacctgttctgaagtttcgtaatcactgtttgtttttaacccgagcgggctgacaattataccgtctcccgtaaaatctgaaatcttcacattttcgatcagcacattgctgctgccttcaatacagattccaaacccccattcatgggtcgaccgcaaagggacattggtatacgtgtgttcatcccgttccccgatgatccggccgccggtgatggtgacattttcacgcctgcctatatagaaagccgagtagccccaggagctgttcggcgccactttaatcgtgcattccggatctaaaacgatggtgagatggctcggcacgttaatcccggcgttccgaaacggctggcttttgtccccgccaagcgtgccgttgattttatacgttccgggcggaaaaaacaccgtatgacagccttcgctgacggctctggccaagcattggttgatggcgcccgtcacatcggtttttccgtctgccgccacaccgcaatccgtaatatccaatatacgattcggcaagtgataatctcctccttcctctcttattgtcatcttattccgccatatcccgctccgcctgtacatactttaaattttattaaaaaagtttataaagatagtttagtcagataatataacaaaataagtcattggaatcaggaaaattcgtctatattcaccgttttaatatcttttcattctggaattttttgaattcagtataaattatattgacacaagtattatataagaatatgatttttgtaatacacttttttaagaaagggttggctcaggtggcatctattgataaggaatctataacagaaactgtgccgcaacgaggctttttcggtcatccccgcggcttgttcacactgttttttaccgaattttgggagcgtttctcctactatggtatgagagccatattgctttactatttatacacggaagtcgctcatggcggtctcggctttgataaaacgaccgcagttgccatcatgtccatatacggatctctcgtatatatgtcgagcgtcatcggcggatggctggccgaccgggtattcggcacggcaaacaccgtattttacggcggaattttaattatgttcgggcacatcgctcttgccttccccggcagcacggcggcgttttttaccagcatggctctgatcattatcggaaccggcctgcttaaaccaaacgtatccagcgttgtcggagatttatatacgaaggaagacgagcgccgcgactcaggtttcagcatcttttacatggggatcaacctcggcggattgcttgcgccgctaattgtcggaacactcggacagaagtacaactaccacttaggcttcggatgcgccgcggccggtatgttcctcggactgattgttttcgctctaacgagaaagaaatacctcggcaaagcaggctccaatgtaccgaatccgatttctaaatcatcagtgatcggcacgggaatcggagtggtcatcgcagcagccgttattattgttctgattcaaaccggctggctgacgatccagcgtgtgattgacaccgtcagtatcctcggcattgtcattccggttatttactttatcgtgatgttcacaagcaaaaaagcgacgaaaacggaaaaatcacggcttgcggcttatgttccgctgtttattgcagcggcaatgttctgggcgattcaggagcagggcgcgacgattctagctttatatgcggatcagcgcacgagactttcctttgcgggcatgcatcttgagtcttcatggttccagtctctgaacccattattcatcgttattttcgcgccggtgttcgcgtggatctggatgaagctcggcaaacgccagccttcaacaccgattaaattcgcgatcggcattatccttgccggattatcatttttagtcatggtgcttccggttatgggcggaagcggcgagcttgtgagcccgctttggcttgtgctcagcttccttttggttgtgcttggtgagctttgcctttcaccggtcggtttatccgtcacaacgaaacttgcgcctgcagctttctcagcgcagacgatgagtatgtggtttttaacaaacgcctgcggtcaagccctgaacgcaaaagtagtcggtttgtttgataagatttctgaagcggcctacttcggctcaatcggtcttgtttcgatcattctcggtattattttaattcttctgtctcccgtcattaaacgggcgatgaaaggcgtacaataaaagagaagcctgcggaatcgtccgcaggctttttttgtgcgtctatcgttttaactcctcaagtgtttctctccatctcttcaggacatcttccggttcgtggagctggatggccggtcctgatgtcagatccgcgtatttcgcccgatcttccttgacggtgatcacgcggcagctgaaccgttcccgctcgtgtttcgcctctttcaacggcggaagcgccttacattccaatgtgacgtaatatgcggctcctccgtgccaggcgatgaaaagagcttgtcccgaatgcagcaggctttttacggtcgtcgtgtttttccataaggcgagccggagatttgttctgctcacggccgcgatttcaccggcgctgatcatggccgcgtgcggacggccttcttttgtcacggattggagcacaaatgcgtcgtgctgctttttttcaagttccgttccgtctaaaagcgcgtaaagcgcctccggcaagtgctccgtcagcattacgcttttctttccgggacagcgggaacatgtgtggccgtctctgtttctttcggatcgattttaaatgccgggttgaatgccgccggattcgtgatactttccggttcacaggatctccatgtgaaaaagcaggtttggcattggtatatttcccaagcgcctttgaccggcgattggctgacggtttctcctttttgcgattcacatcgcgggcatgttttcatagtaaactcatcctttcttattgattcattaagtccatcagtttttgttcccactctttcgttgtcagcggggaatcaagcggctgcgaataatggcctcttgtttccggcgcgacaggcgtcgtggcgtcaagaatcattttgtgtgtcatccctgccggatcagaccccgggtcaagcggaaggacggacagatcaggaatgatgactgcatcgtgtttcggatgcattttcgttgagagcgcccacatgacttgcggcaggttaaacggatcgacatcctcatccacgacaatgaccattttgcagtagccgagtccgtgcggcgtcgtcagggcgcgcatgccgacggccttggcaaatccgccgtagcgcgttttcgtggagataatggcgatcagcccgtgcgtatacatcgcattcacggcgacgatttcgttcggataggcttccttcagctgctggtaaagcggcacgcacgtattaatgccgatcatataatcgcactccgtccacggcatgcctaagtataaatgttcaaaaatcggattgtttctatgatatacccgtttgattttgatcaccggcatgctgcggccgcctgaataatggcccgtgaactcaccgaaaggtccttcgtattcccgttctcccgcaaggatctctccttccagaacgacttcagcaccccaagggatgtctaaatcagacaatttagatttaacgattctgtagggctccccttgaatcgcgccggccatttcatactcggattgatcgtataacagcggagttgatgcagccgtcgtaatcaccggctcacagccgagcgcgatcgtaacgggaagattcacgccgcgttcttcagcttggcgaagatgaatcgcaatatcatgctgaggcacgggctgaatgccgaggcggtctttcccctttacctgcattctgtaaatgccgacattctgcttgccgaaattgtccggatcttcaagatcgcgggaaatgacgcacgctttatccaaatagtagccgccgtcccctggttgattctgaatagcggaaggatgtcaaatagattgatatcttccgttatttcattttcatgaaacggcgcggtttcttcccgtttgaccggcaccggaaatgcatcgtaccgtttggcaaactcaaagaattgttctttaacaggcgtatctttcggcatgccgagcatcatcgcgtgattcggccacgagccgatgacattcagagccacctgcgcatcgtgatgtccgtaaatattgttaaacaaaagcgcaggggttttatccccgagattgctggctgcacgcgcggcggcgcccaggtccggctccggttttacctcttcgttgacggttaagagctgcccttctttttcaagagcggcgagaaattccctaaaatcctgataggccattatcagattcctcctttttgtttttcaattccgtaccaccgtttcgcttccggcagacggatgccgaactgatcgagcgtccggaacacaatatggtctatcaattcatccatgtcagccggcttgttatagaatgccggcatcggcggaagaatgacggaacccatttttgtaagcgctagcatattttctaaatggatttggctgagcggcgtttctcttgtcagcagcacaagttttttccgctccttcaggatgacgtcagccgcccttgtcagcagattgtcagccattccggtgcggatgcttgccagtgatttcatgctgcacggagcgatgatcatcccgtccgtttcaaacgaaccgcttgaaatcgccgctgcctggtctttgtgagaatacgtataggatgcgagtttctcgacatcttttaacgtataatcggtttcatgtgtaatggtgacatttgcccaaggagacacgacaagatgggtttcgatctccgcggcttttaaatattctaaaagcctgatcccgaatatggctcccgttgccccggtcattccgatgacgagcttcatattgacccctcctttacgcttgaaatgtggtgtcaaatccatcatactcctgatatatccatatgaaaaatattcgttaaatctatgtatcataccttaaaggtataaaagaaaggagcgagcgttctcatggatattcggcaattgcgttatttcatcaccattgcccaagagcagaaaatcacgacggccgccaaaaagctccatatggcacagccgcctttgagccgacagttgaaacagctcgaagaagaattgggcgtcattctgtttgaccgcaataaaaagaaacaaatgaccctcacatatgaaggaaacgtctttttgaaaagagcgaaagagattcttcataagtttgaggacgctataatcgaggtacaagagctgaaggaggaggtggccgggacacttgccgtcgggtcaaccatttactgcgcagcgctcatgcttgagaaagtgtcacagatgaaagagcggtttccgcatctcacctttaacatttgggaagatgaacccgtctcactgctggagcttctggaaacccggcagattgacgccgccgtcaccaccaccttgattaaaaacgacggcattgaatcgaaggagcttgaagacattccgtgtgtattggtgctgtccgagcattcaaaacgactgtgcggagaaacgattaaactgaatgacatcgcctctttgcctctgatccttttgcgcaccgtcaatggaagaggtgtgtatgaccaagtcctccaagtttgtgaacagtacggtctcgacctccaggttgtttgtgaatgccatgactccgcgacgctcttgagccttgtatcatcaggattcggcgccacaattctgcctttgacgatgattcccgtccatatgcgctcgcatgtcaaaacggttatcatcgaagacaacccgtttgtcatgacaccggccgtcatctggagaaaagacagctacctgccgaagcctgtcagacagtttttggaattattttgatccggaacacgatgaattcccgcttatgaaaaccaattacttgactcatactaaaaaaaagttatcctttacaattgggagctattttttctcaataaaactactcagaaaagtggggaataaagaagatgaaaaaagcattattcgctttgttcatgatggtcagcatcgcaatgcttgcagcctgcggaaactcacaggacagcggatctaagtcaaaagacggcgatctttgggcttctgtcaagaaaaaaggcgtactgaccgtcggtacagaaggaacgtacgaaccgtttaccttccatgataaaaagactgacaaactgaccggatatgatgttgaagtgattcaagaagtcgcgaaacgcctcggtctgaaagctgactttaaagaaacacaatgggacagcatgtttgccggtttaaacgcgaaacggtttgacgtcgtcgccaaccaagtcggcaaaacaggccgtgagaaccaatatgatttttctgataaatacacaacgtcaaatgcagtcgtcgtgacgaaaaaagacagcacgattgcgaaagaggctgatgtcaaaggaaaaacagcggctcagtcattaacaagcaattacaataaattagcgaaagaagccggcgcgaaaattgaaggcgttgaaggcatggcgcaatcccttcagctcattcagcagggccgcgctgatctgacttacaacgataagcttgccgtactgaactacttaaaaacgtccggcaataaaaacgtgaaaatcgcgtttgaagcaggccagccgcagcagacatatttcgcattccgaaaaggaagcggcgaacttgtgactcacgtcaacaaagcgttaaaagaaatgaaagaggacgggactctttctaaaatagcgaaaaaatggttcggcgaagatgtttctaagtaacatgccggaacccgtgattgcaacagccattccgtgggatttggtgcagcagtcattctggccgattctttccgggggaatctattactcgattccccttaccattctttcctttattttcggaatgatcatcgcgctgattacggcgctcgccagaatgtcaaatatgaaaccattgagatgggtgttcagcgtatacgtatcagcggtgcgcggcactcctcttctcgttcaattgttcatcattttttatctgttcccgacatttaatattacgctggaccctttcccaagcgcagtcatcgcgttttcattaaacgtgggcgcctatgcttctgaaatcatccgggcatctatttcatccgtgccgaaagggcaatgggaagccggttatacgatcggcatgacctatcgcaagacattgttccgcgtgatcctgccgcaggcgtttcgcgtgtccattccgccattatcaaatacatttatcagcctgatcaaggatacatctctcgcgtcacagattctcgtcgcggagctgttcagaaaagcgcaggaaatcggcgcgcaaaaccttgatcaaatcttggtcatctatattgaagccgcctttatttattggatcatctgcttcttgctgtcaatcgtacagcatgtgatcgaacggcgtctcgaccgttatgtggccaaataaggaggtttcgatatgctttccgtcaaaggattaaataaatcattcggacagaatgaaattttaaaaaagatagatatggagatagaaaaagggaaagtcatcgccattctgggaccgtccggttcaggaaaaacgacgcttctgcgctgtctgaacgcgcttgagatccccaatcgcggcgagctggcattctccgatttttcaatagatttctccaaaaaagtgaagcaggctgatattctccgcctccgccgcaaatcaggcatggtctttcaggcgtatcatctgtttcctcaccgcacggcgcttgaaaacgtcatggaaggacccgttcaagtgcaaaagcgcgacaaggagcaagtcagaaaagaagcgatagagcttctggaaaaagtcggactgaaagacaaaatggatttatatccgttccagctttccggcggtcagcagcagcgggtcggcatcgcccgcgcgcttgcgattcagcccgagctgatgctgtttgacgaaccgacgtcagcacttgatccggagctggtcggcgaggtgctcaaagtgattaaggatctggcgaacgaaggctggacgatggtcgtcgtcacccatgaaatcaaattcgcgcaggaagtggccgatgaagtcatcttcattgacggcggcgtcattgtggaacaaggaccgccggcccagattttttccgcgccgaaagaagaacgcacgcagcggtttttaaatcgtatactgaatcctttgtaggagccggagaagaagcgaaacactgatttcgcttcttctttttttgggcggttatgctacaatgacaattaatgaatgttatgaaagaagggacctctttgaagcgggaattcttgatgcgctggacgttttattttgccggtctgttgattttgtctttcggggtatcgttaaccattaaaggaaaagctctcggcatcagcccttgggatgcctttcattatgggctttttcagcatttcgggctatctgtcggccaatggtccatcttggtcggcgcggtcatcgtggctttaacctgcctgttcacgaggacgctcccgaaaatcggcgctatcttaaacatggtgctgatgggaatgtttattgatttcttctcgtttctgcttcctgaggcgcacgctttttccttagcggccgtgtttttttctatcggattgctgctgatcggctgcggcgtcggtatttacgtatcagcagggctcggcgcgggcccccgggactctctgatgatgctgatatctgaaaaaacgggctggaacgtgcaatgggtgcggaacggcattgagctgacgattcttgccgcagcctgggtgatgggcggaccgatcggcgccggaaccattattacggctgttttgacggggctgattctgcgtttttctttgccgcagtcctctaaactgttaacatacgcgatctccgggcgggcaacgtccgttcattaaaaacaaagccgaaacggttttgtttttttattttcggacagctttcgtctgatatggtaggatggttttgacaatattttcagacggaggatctggacatgaagatttacggagtatatatggaccgcccgctttctgcaggggaagaggatcggatgatggcggccgtgtccgccgaaaagcgggaaaaatgccggcgcttttaccataaggaggatgctcaccgcaccttgatcggcgacatgctgatccgcaccgctgcggcgaaggcttacggacttgatccggccgcgatttcattcagcgtccaggaatacggaaagccgtacatccccgcgcttccggacatgcactttaacatttcccactccgggcgctggatcgtgtgtgccgttgattcaaaaccgatcggcattgatattgaaaaaatgaagcccggcacgattgatatcgccaaacgttttttttcgccgacggaatacagtgatctgcaagcgaaacaccccgatcagcagaccgattatttttacctcctgtggtcgatgaaagaaagctttatcaagcaggccggaaaagggctttcccttccgcttgattcattcagcgtccgcctcaaagacgacggccatgtgtccattgagctcccggacggacatgaaccttgtttcatccgcacatatgatgcggacgaggaatataagctggccgtttgtgcggcgcatcccgatttttgtgacgggattgagatgaaaacgtatgaagagctgatgtaagcatagaaaaaggagggtatcccctcctttttttgtcagcctgatatttccgcctgtttctgcagctgctttgcttcttgataaatttcttcgaacagatccgcgatgtattcttcttcaacacatgaaaatgcgattcgcaaatcggtttcattaatggatatcgtcccgattcctctcttttcaagcaacgacactcttaattcgccggcgtttatgtctttcagccggacacacatgaaataacccgagttaaacggataaggcgtccatacgtcttcatagtgcttgttttctgcaagaacggctttcactttgtcagcccgttttttcatgatattatatttcagcgatttttctttctcgtattccggtgactgcatcgcccgcagcataaacgtttgggacggatgcggggcgcttgaaatcgttcccctgataatcccttttgttttttcctcgagcacgcgcagcgctttttcgctttttgtgctgtacgtaataaaaccgacgcggaagccccacgcgtaattttccttcgtcgcgccgtctatttttacgcaaagcacccggtcgtgcacttgggcgagtttgctgaagatggattcctgaatggccgtttcatcgtaaaacagattgtaatacgcatcgtctacgagcacgacaatctctttgccggcctccgctgcctccaggatcacactgacgatttctgacgcttcctcttcccccggcgtatagcctgtcggattattcgggaaattcagcacgacaatcgccttttcttcctgctttttcagcagctcggacagccccgccgcattaaaacgcccatcctgctgaaaaagcgggtacgtctcaatggatgccttgcgccggacaccgaaaatgaaattgtaatttccccaatatttatccggcagaagcagcgcatccccttcattgacgaacaagtcggcggcaatgctcagcccgtgtgttaaagcgtttgtcacgatcggcgtgctgatgtctttgccggctaatgaaggattttcgagacgcatttttttcagccattcctgtctgagcggctcttttccctgcggcggagcataatcgtagatatcatcggggttataggcggacagtgtctcttgaatatgggaaaagtgcatggactcgccttgtgaggtggcaatcccgatcgtggcattatactttccggccttggctttcgcttccgccgattgtgtcagcacccctttcggataaaacaactctctgcccaaatcagaaagcatatgaagcacgtgcgggttttcttcagataatgttctgttcagctcttttgctgcatcattcatgtacgacaatcccttcaaaattatattccatcaaatcataacataaaatttttgataaatgagaaaactcacgggcagattttgttacaaaaaacagacagcgaatgctgtctgtcatatcctataacaattggcctgcagtgctcctgttaataatctcatatattcgttccgccactttttcagtttcacttaatatgaacatgtggccgtccgaaaactcatgaaatacgggattgtcggcccattttttccatccgtccgcatctttgatacattttttatctttccgcccgttaaaaatatggacgggtgattgaatcatgtgagaatcagacggacggaagctttcaagcgcgcggtagtcggacctgaaagaaggcaggaaaaatgacatgacctccttattctccactaactcctgcggcattccgcccagctcgataatatgggcgagaaatttttcatcatcaagatgagacacttttttcctttcaacatgcggcggctgaatggctgagatgatcacggcctgcgggtaaatcccctcccgctcaagcttttgcgccagcctgaaagcgaccatgcctcccatactgtggccgaacaggacaaacgggcggtcaggatggagattcaactcctgcttgtataaactgacaagctgttcaaaatcctcaacggcggacatttgatttgttccgtgtcccggcggttccgcggcaagcatctcacactcaccttgaagataggtgtggagcgggcggaatgatgcggaatagcctcctgcgaacggaaaacagataagctgcgttttttccgtggtatcgaacgatttaaagagctggaccattggcgggcttcctccttttctatcgtgaagctgtcagcttcggatgttccttccttaggaattcgagcaaatatgccgcattcctttcgagacattctccctgaagcatttctgcgtgactgccgcagccttttttcacacggtattcacctgtcgtggcttcctcccacgaagcgagccacggcggcatcgcaaagtccggttctgacgttaatagatctatatccgcattgaccgtgccggtgctgacggtatgcacgaaataagaataaaacgcgtttgtttttttggcgagaccttctttgacggcttcgtcattcagcgcttcgttatcccggtttaccttcatcagcgcctggacatcgctttctacggtgcggccttccaagtcgctgacgccttgttttttataggaatcaaccatgatcagccgctccactttacgtccttcggcttcaagccgtttggccgtttcaaaggcgagcgtgcagcctgccgagtatccgaacagcttgaccggtccttccggctggagctgattgatcagctctgtgtagcgttcgatgcggttgtcttcctcgataaaatcaaacgcacagattctatagccggacagctgttttgccagcggctggtacatcagcccgtaaccgagaaccggcgggaacgcaaacagtgtgtcagactgatttttattcatgatggtgagatctttcattcctttttcttcaccgtgaagcagataaccggcaatgtctgcgattgtcgtcgcttcgaataacagctgcaccgggatgtccgtaccgagctcttttttaatgcgcgacgctgccgtcatcgcttttaaggaatggcctccgagcgcgaagaaatcatcatgaatcccgatctgctgtctgccgagaatctcggaccagatgtgtgcaatcgtttcttccgtcgcgtttcgaggcccgatccattctttcgccgcctgagcctgatccggtttcggcagctgccgtttattgaccttcccgtttgtcgttaaaggaagctcttctaagaaagtaaaggtttgcggcaccatgtaagcaggaagctgttttttcaagtgcctctttacgtcttcagctgaaagcggcgtccggttcacgagataggcgttgattgatgcatctccggactcatggcggtctgcaacaacgaccgcatctttcacacccgggtattcctgcagctgcttttcgatttcttcaagttcaatccggtgaccgcgtattttgacctggtcgtcaatacgcccggcgtattcaatcgttccatccggcagccagcgtgctaaatcccctgtgcggtaaagcgtttctcccggcttgaacggatttgggataaacgtttgcttcgtcaggtcgtgacggttcagatacccttttgatacacccattccgctgatgcacagttcaccgacagctccgaacggctgaagctggttttgcccgttaagaatataaatacttgcattgctgatcggctttccgatcggcaatgaggaaatggaatccggtatatcatgcacgacgtgagctgtcgcaaacaccgttccctcagtcggcccgtaacaattaatcagcttgccaggccccatgatctcaagcgcctttctgacgtgaggcacagacgcgcgctcacccccgaataacacacagcggagccccttcagccactcctctcccgcatcggtgagaagattaaaaagtgcggttgtcgcaaacatgacattgacattctcctgccggatcagatcagtgagccgttctgtatcaagcagtgtatgttcatctgcgataatgagccgtgccgcattcaggattgatgcgtagaaatcaaaagtaaatgcgtcaaaggcgtaattcgaaacagataagaacgtatcttgttcagaaaatgccatatagtctacatgcttgaccaatccttgtatattggcatgagtggtgatattgcccttcggctttccggttgtgccggacgtatacataatatacgccggatcatcgggatcaattgcggctgcaggatcgcttgcctgttcctcaaaccgtgcttgatcatcgatgatgagtgttgttcctgtatacggcagctgagccgctttttctttcatctcctgatgtgtcagcagacaggcagccgcactgtcagtcagcatatacgagattcggtcctccggcagcttcggatcaaccggcagataagccgctcccgcttttaatacgccgagaatgccgatcaccagttcaagcgagcgcttcgtgtacaacgcgacaacggtgtctttacccgcaccttgcttttgcaaacggcgcgcaagacggttcgcttcctcatctaattcgcgataggaaagagtctggccggaatacgtaagcgccggtgcatcaggatttacattcaccgcttccttgaaccaatccgtcagaggcttcgcctgatgagtctcagccggcgggtttaagccggtaagcagaagctctctttccttttcatcaacaagtctgatcgtattgacagggtgatccggcttctggatgagctgctgaatcgctgtgagaagctgagattttaagcgcaggataaacgcctcatcaaacacattcccgttataggcaagcttaatcagcatctcatcacctggagaagccatcaggttgagatcataattcgatttctcaaaaacatggacgtcctccatatcaaagccgttttcactgttctcttcattttttgcatcctgaagcggataattttcaaacacaataatatgatcaatcagctttggctgatcggcctggctttggatgtcatagagcggcacatattgatgaggctcagactgcagcgattgctcctgcagctgcttgagcaagccgttaaatgtggtatcctcagacagcttcacccgcctcggaacagcattgataaacagcccgaccatatgttcaacgcctttgatttctgcgggacgcccggaaacgactgtgccgaagatcaaatcgccggactgctggtagcggctgattaatacactccaaaccgcctgcagcgccgtactcaaagtggtatgctgcgattttgcaagctcggtaaatgcttttgtttccgcctccggcagtgagaagagcagctctttcggctcatagccgttctcttgtttctttctttgctccgcaaatgtcgtttgtccttcaaaatcttctaagtacccgcgccagtaatgcagtgatgcatgtttatcctgcttttcaagccacttgatatagtctttatacggtttgaccggcggcaggctgtacggcttttgttctcgcagggcattgtataccttaaacagatcctgcacgacgatgccgaagcaccagccgtccaaaatgatgtggtggtagctccacacccattcaaagctttcttccgattttttaaagatggctgcccgcatcggaatatcccgcgtcaaatcaaagcccttgatcttatcctgttctttgtattcattaattttggatgcttgctcgctgcccgttaagtgtgtcagatcgatttcttctatctgaaactgccgttttttcaatacgacttggaccggcctttttactttttcgtgaatgaacacggtacgaaatacatcgtaccggtccatgatcacattcatgctttcttcaaggcatttgatattcaagctgccttttactttcattgtcatttgttcgatgtaaaagctttggccgggattcaggagagtatgaaacagcattccctcctgcatcggcgacaaataatacatgtcctgaacttgatcttttttgaactggctcatctgctccgctcccccttctgttaactgtttttgtcacgttaaattctcctcaagcatgtcaaagatgtctcccatttcatccatctcaagatcctgcgcgctgaaatcgctcggcgtaaattctttctcctctttggccgtgcaatggcggatgatcattaaaagattgtctttaaaccgctgcatctgtgtttcgacggtgcttctttcatattcttcctgattgtatgagcaggaaatgacgaagcggccgcctgtaaccatcccgctgaagctcagtgcgtataacgcctctgactcttcgctgacttgacgtcccatatcatatggagacggctcaaaccattccgttttcacttcattgtcaaactgccccaagtagttaaaactgatttcaggcgcggcgcctttttctgtttcatcggatgacagataccggagaattccgtatcctacacctttatctggaacgcgccgcactgtctcttttaccgttttaatgacggaagagacgccgtcttccttgctgatctgcagaatcaacggatattgggccgtaaaccagccgaccgtccgtgaaatattgacgttcggtatgatttcttcccggccgtgtccttctaagttgatgccgactttgccgttttccgtccattcaccgatcgttaagccgagtgcgctgagcagaatgtcgttgatttccgttccgtacggatgatgaacatctgtcagcagctgtgccgtttcttcctcagtcaattcacatttcacggccgccgtatgtttgacgagccgtttgtccggatcatggtctttcggcagcggccggagctcttccgcatctgcctgcgcccaataatccgcctgctttttcagctcttctgattgcgcaaacgtgttcagcgcctccgcccaatctttaaaggagtgggttttttgcgggaggacgatgctgttttgctgctgcgcctgtttataacctgaagcgaaatcctccagcagaattctccatgaaaccccgtccacgacgagatggtgaaccgcgattaacagatgatcgccttgttctgtccggtattgctccgcttttaacagcgggccgttctccagatcaagactgccctgaagatgatcggcaagccgctgaatctggcttttcagcatatcctcgtccgttccgtacagatcaacgatttcaaagcttgccttgcattctgtgacagggaggtatgtctgaatgatgccttccctttcttcacggtaaaccatgcggagcgcatcatggtgttcaatcaatgcttgcagggttttttccaccaggtccggatcaaagccgtctttcgcgtgaagcatgacggattggttccagtggtgtttgtccgtgaagtttttctcaaagaaccagcgctggatcggcgttaactccgcttcgccttcgacaggtccctggtcggcctgcttgccttccgtccgctccacataagagacgagctcttcgatggtcgggtgctggaagagatctttcatctccagcttgtagccgtgctggttcaggcggctcgccatttggatgcctttgatcgagtcgccgccgagggtgaagaaattatcgcttacgccgatctgatcaagaccgagcacttcctgccaaatgtcggaaagcagcgtctccatctccgtttccggcgctttgtaagcggcgcttcccgcttcaatgtccggttccggcagggcttttttgtcaatctttccgtttgcggtgaccggaagctcgtccatctccacccagaacgccggcaccatgtagtcaggcagcgtgtctttcagcgcggctttgagcgcttcaatatcgtcctgccgaggcgcgacataggcgcaaagcgcggtattgcccgctttgtcttccaccgccgtcaccgctgcgtcatgaacgtccgcaagctgggcgaggcggacttcgatttctgaaagctcgatccggtagccccgcactttgacctgctggtcgatacggccgatgtattcgatgccgctctgcgcgttccatttgacgaggtcgccggtccggtacatgcgctcgccgggcacgaacggatctgcggtaaaccgcttcgccgtttcttcctcacggttcaggtatccgcgtgccagaccgcggccggccacgcacaattcaccggcaatgccttccggctgcacctgatcgccgtcgccgagaatataagctctcgtattggcaatcgcccgtccgatcgaaagcgatccttcctcaggattgatgacgccgcttgtcgcgacgacggtgttttccgtcgggccgtagttgttgacgatcgtgtacggctgtttcaccgcccgcttcagcttgtcgccgccgacgagaagcatgcggagagaggtattttccagctccataaattgttcggccagctgcgtcggcaggaaggtgatggtcacgccgtgctcctcgaaatagtgatttaagcgggtgatatccagccggatcgcttcgtcaatgacgtgaagctccgcgccgatggtccatgtcgggaacatctcccagatggaggcgtcaaaaccgaagcccgcgtatttggcgcttttatcatccgccgtcatggcgaatgcgtcgtgatgccagaagcacaggttcaccagcgcatggtgttcgaccatgacacccttcggctgtccggtcgttcctgacgtgtaaatcatataagcgagatgatccgccgttgtttcagtctgcgggttcgcttcatcgttttcatcaagcggcaggctcagaatggagcgtccgccgtcaagcaggatcgtttctcctgtgtagccatccggcacgtccagcgcttcctgtgtgagaagaagcttggcgccgctgtcctgcagaatgtagctgatccgctcttgtgggtagtcggggtcaatcggcacaaatgccgcgcccgctttcaggacgccgagtacgcccgcggccatttccaaggacggtttcgtcaaaatgccgacacgttcgtcagccgtgacgccgcagtctatgagaatgcgcgcgatccggttcgcccttgcgttcagctcgccgtacgtccatttcgcgccgttatatgccgcggccggccggttcgcgtatcgggcggccgtttcttcaaagagacggtgaaccgttttgtcctgcggcacagagagtgtttttcctttccatgcgtcaaggagggcttgtttttcagcatcgctgatcagtgaaatctcaggcagctttctgtccgggctttccgccgcttgcttcagaatccgcaggaacccggcgctccacttttcaatggtttcttttttaaacagatcagtcgcatattcaaactgaaggccgagaccttcttgatccgtaaagccgccgagtgtcagatcgaatttcgccgtgccttggtttgactcatacggagtgatgcgcaggttctccagttccagtgtttctttatccggatcttctgtcgtcaccatcacctggaacagcgggttgcggctcatatctctcggcaggtcaagctttccgatcagatcctcaaacggataatcctgatgcgccagcgcgtcgagattggtttgtttcacccgttcgagcagcccggcgaaggtctgctctttttgcgtttcattgcgaagcgcaagcgtattgacaaacatccccggcatttcctgaacttcggcgctcgttcttcccgcggtcaccgaaccgataatgatatcgcgctgtcccgtgattttgctcaaaaagacatggaacgcggcgtgaagcaccatatgaagagtcgctcccgatgattccattaattcacgcaccgctttttccgtctcacgccccgctctgaaacggacggattgtcctttaaaactttgaaccggcggacgcggaaaatcggtcggcagattcaattcaggaagctcgccggaaaatgccgagagccaataacgctcatggtctttcatccgttcggcctgcccgggttcattctgccagacggcgaagtctttatagtgcaggttcggcgacggcagacttccgcctttgtaaaggtgagcgagctctttgaccagcatgcttctggacacgccgtcggcaatgatatgatgcatatccagcagcagcaggtgtttcttttcattcagtctgacaagagcggcccgaatgagcggagccgcgctcagatcaaacggcttaatgaatgcctgaatgataagatccgccttctcctcgtccgctgcttcaaaaatgtgcaggtcaatgtcagcctgttctgcgatctgctgcatcggctggcctttttgatcgataaaggacgtccgcaaagattcgtggcggttgatcatctgattgagcgctttctgaagccttgaaatattgacttctccttccatcagaagaacggacggcatattatagctgattgtctcccggtcaagctggttcagaacgtacatccgtttttgggcggatgataacgggtacgcgtctgcactgtctgccggtgtgatcatccgatatccctcagataccgccgatttttcgatatatgcggcaagcaggcggacagtcggctgttcgaacagcgcttttaacggaaccgttttgtccagttcagcctgaatattggcgaggagcatcattccttttaaagagtgcccgccgtaatcgaagaaattatcgtcgatgccgagcgtatccgtaccgagtgtctgtttccaaatgcggcacagcttttcctccaattccgtttccggcaaggctgaagcaatttgcgccgtttggctgacgcccggtttcgggagggcgtttttatcggtttttccgttggctgtgagcggaatgcggtctacttgcacgaaataggccggaagcatatgagacggcagtgtttcggaaagccgtttgcgaagctcagagcctttcagcccgctgtcggctttatagtacgcgcacagttccggcagcccgccttcgctgactgcgagaacgaccgcctcctgaatgccgtttacgcttaacagcacggtttcaacctcttttaattcaatgcggtagccccggattttcacctgatcatccgcacggccgataaattcaatcgtcccgtcaggaagcctgcggacgatatctcccgttttgtacatcaggctgtccggtgaaaaaggttttgagagaaatttctccgccgtcagctgcggacggtgaagatatcctctggcaagccccttcccggtaatataaagctcgccgcttgcgcccggaggaacgagctgcattgctccgtccaatacaagcgcgccggtatttgcgatcgggcggccgatgacgggacgctgctcatattgatcaagacgctccatattgatccgttccgcaatggcgccgatcgtcgtttccgtcggcccgtagtgattgatgaagtcggtatgggcgtatacgtcatgaaacttgcggacatcggacgtgatgatcttttctccgccgagcaccactaaacgaagcgagctgaaacggcgttctgacgtaaaacgggctgtattgacgatcatatggaacaatgacggcgtcagtttcatatacgtaatgccgtttttctgtatatactcaccaagctgatcaggcgcggtgtacgtctctttcggcacaatgtgcagctcgccgcccgcctgaagaatcgggaatatggccgtatagccgagatcaaatgcgtaagaagacagcagcacggatttgtcagcttcggtcaaaccggcttcacggctgaaccatgtgacataattgattagattgcggtgttccagctggacgcctttcggtttgcccgttgttcccgaggtataaatgatataggcaagccggtcggcgccggactccgtttcaagccggtcggcgctttcgttctgccattctccgtcttccattacgaccgtttttcctttataaacggcggccgcggtcatgtttctctcattgacgaccagaagcttcgttccgctgtcttcgagagagtagcggattctctcttcaggagtctccggatcaatcgggagaaatgccgctccggctttcatgacgccgagaatcgcggtaatcaagtcggccgaacgatccatcataatggccacgatgtcctcactgcccgttccgcaagcctgaaggtgtcgggcaaaccggttcgagcgttcatcaagctcacgatatgtcagacttgttccgcccgcaaccgccgtgagatcaggcgttttctgcgcttgccgttcaaacagcgaaacaaaagtgccctcaggcagatccgcttccgtccgtttttcatcagaaaggagcgcttcccgctcaggagcggacagcaggcttgcgtcggccagctgaatatccggattttcggcgcaggctttaatcagattgacaaaatgagcgctccagcggcggatggtttcgtccgcaaataaggctttcgcgtaatcaaagctcaatccgacctcttctccgcgctcagccgcttctaaggaaagatcaaatttagcgacatgatgatgcatggagtaagaagaaatctccaaatctccgagccgcagggccgggatctccatgttctgcatattaaataacacgctgaacagcggactccggcttgtgtccctcgttaacggcagtttttcaattaattcttcaagcggatagctttgatgctcaaaagcttgaaggctcgccgttttcacttcatccagaaattgcttgaacgtttttttgccggcaggatgcgaccgaagcgcaactgtgttgacaaacatgcccggcacgtcttggagatcaggatgctgtcttccggccgccggagacccgactatgatgtcttcctgccccgaatatttggacagcagcacttgaaaagcggctaacaagaacatgtacatcgtcgtatccgtatcagccagcagcttcttaatctgcgccgtcacctgtttatcaagcccgaagatgacgcgttccccttcaaaactgcgctcggcaggacgcgggaaatcaagcggcagatccagcaccggcagatcgcctttgaacgtatcaagccagtaagcttcgtgctgatcaagatttgctttttcacgctgccagactgaaaaatccttataatgaatctttggcagctcaagctccgtgccttgataaagcttcgcaagatcaccgatgaaaatgcccattgagcttccgtccgtaataatgtggtgcatgtcaatcagcagaagatgccggtcttctttaagccggatcagcttcgaacggaccagcggcgcacgattgagcgcaaacggcctgataaaggcttttgtcagctcttctgcatcttcttcccggccctcggcggtttcaagctcaaacgacacatttttatgaatggtctgcacgacttctccatctgccatgtcaaacgacgtacgcagtgtctcatgacggttgattaatgcctgcatggcctcttcaagacggtttttgtctactgatccttccagcagaagtacagcagggacgttgtagctcgtgctggcctgtccgagctgattaaggatatacatcctgcgctgtgctgaggaaacaggataatgcttctgataaggcgcttgtcggatcggttcaaactgctgttcctcctcggtctcatgctccaaataatgcgcaagctcctgaatggtcggcttttcaaataacactttaatcggcacttctttttgaaagtgctcctggattttagcggtcatcatcatggcttttaaagaatgtccgccaatcgtgaagaaattgtcagtcacacccgcttttacaccgagaatgccttcccaaatgtccgcgagtttctgctccgcttccgttttcggcgcttcgtattctttttgaacggcttcagcctgaggctcaggcagcgcttttttatcaatctttccgttcgccgtcagcggaaactgattcatctggatgaagtgcgcgggaatcatgtattccggaagtgattccgaaagcgttttgcgcaggtcttccggcgaaagggcttggtctgcggtaaagtaagcgcagatttcattttcatccgctttatttttccggatcacagccgcagattccgtcacattctccgcctggctgattttcgcctcaatttcgccgagctcgattctgaaaccgcggacctttacttggttgtcaattctgccgagaaactcgatcgtgccgtccggaagccacttcgccaagtcccccgtccggtatatcgtttcatccggtctgaacggatcgcggacaaactgcttctccgttaattcaggcagattcacatagcctcttgccactccgcttccgccgacacacagctccccgggcgcgccgatcggctggaggttgcggttttcgtccataatgtacgcagtggaatttccgatcggcttcccgatcgggatcgaaccgtcgtagtcctgatcaatgagaaaactcgtcgaaaacgtcgtattctccgtcggcccgtagccgttccaaagcgacagctccggtgatgccttcctcactttgctgacgatatgcggcacaagcgcatcaccgccgatgatgaggtgccggagcgtgttaaacatgccggcatccttttgggcaagctgattaaacagcggagacgtcagccacatggtcgtgatccgctgctctttcagaaattgggcgaatcgtccggcgtcaagcagcgtctcttttttcaccgggtgcaatgccgctccgttcagcaatgcgccgaagacttcaaaggttccggcatcaaagctgacggctcccgtttgcgccatccggtcttcttcatgaaccggcacgtaattcgaaggtttgacgagcctgatgatatttctgtgttcaatcatgacgcctttcggtttgccggtcgatccggatgtatacatgatatacgccaagtcgttgccgccggccgggagattcaagtctgttccgcttaccgtttcatccgcgctttcattcagcatgacaatcgggacttgcaatgtgcccgcttgttcttgatagtcctgaactgtcagcacgagccgaatcgagctgtctgccgccataaagcggagacggtcctccggaaaagccggatcaatcggcacataggcgccgcctgcttttaggacggcaagcattccgataacggtttccgcagaccggtcgttcataatagcggcggtccggcctttttccagcccgctcttcacaaggtgtctcgccaggcggttggccgcttcgttcacttcacggtaggtccattcgcgtccctcttcttttatcgcgatgcttgcaggcgtccggtttgcctgtgcttcaaacaaacggtgaacggcctcctcttccggaagcgccgttttcgtatcattgaatatctcaacaatctgccgctcttcttcgcctgaaacaaggccgagttcccgcacgggcgcgtcaggcgttccgaccgccgctttcatcatgcaggtcagatggtgcgccgttcgttcgatggcatcatgtgcgaaagccgctccgttgtatttgattttgacggtccacgtttttcccggatacacgatgagattgaaatcaaagctcgtctgctcaaaagcatgttcaactttaatggaaaagccgagtctttcctccatgcccccgttttccagctctttgtccagcggatagttttcaaacgcgaccaaatgattcaagaggctgccgtccagagcggagcgcttttgaatgtcatagagcggcacataatcatagcgctcggcttccacggcgtttttctgaactgccgccatcacgtcagaaaaggctgcatctttgtcaatcttgattctgacaggaatcgtattgatgaacagccccgccatcgtttcaatgccgttgatttctgaaggacggcctgatacgacggtgccgaacaccacatcgtctgtatagttgtatttgctgagcaccgcaccccaaacggcctgaaacaggttaggccccgtgacttgatgccggttggcggtctgctgaatctgcgcgaccagctcttcatcccagacaaaagaatattcttcattttggtagtctttcttttctgatgccagacggcccgggagcaggctcggctgttcgaaatccgccaggcggctgctccaatattgttccgcctcctcataatccctgcctccgagccatttgatatagtcagagtaaggtttgccctggcttcccccggcgggccggccggcacgaagcgcttcatagttttgaaacaggcttttcatcaaaacgcccatactccagccgtccatgacgatatgatgattgctccagacgagatacagttccttctcactgagcctgaacaccgccgctttaaagagaatatccttcgccagatgaaagccctgctgctgcacatcgcgtttatagcgttcaatatattcggtttggcgcgcttcatctaattgactgatatcttcatagtgcaccttcgtcttccgctctgctaatacgacttggcgcggtttttgaagctgctggtgcacgaataccgtacgcaggatgtcatatgtccgaatcagctcattgacacttttttcaaaaagctcaagctgaaagcttccgtgaatcctaagctctaattgtgtgaagtaggaggaagaatgcggatcaagcagcgcatgatacagcattccctcctgcatcggtgtgagtgcatacaccttttgaatcgattttttgctcatatgtcacctctgtcttttctgttagagaatttccattaatttatcaagttcatcaagcgtcagatcatcatcgccaagatcgctaggcgtaagctcaggtccgtcttgggccaggcagtgatctatgattttcaagaggtgccctttaaagctgtcactgaacgattgaatggttttttcatgaaattcgagagaatgataggcaaacgtcatcgtcatctgcccattttctataaatccgacaatatcaagcgcattcggcttctctgtgtcagggctcagcgattgtcctgacggcatcccggatcttgtaaataagccggaatccgacatctcattaaactggcctaagtagttaaagctgatatccggatcaatctcaaatgaaagaccctctttatgctcaggcgccgttacataacgcagaatgccgtagccgactcctttgttcgggatgtgtctgatgtcttctttcatttgtttcagctgatatgaaagatcgtcggcgtgcttcatctcaaggatcatcggatacatgctcgtaaaccatccgaccgtccgggtgatattcaggccgtcaagaatgtcttcgcgcccgtggccttccaaatgaacgccgatcgtgtcttcacccgtccactctttcagcgccagtccgagcgccgtgagcaggatgtcgttcatttccgtatggtaggcttcatgtacgtttgtcgtcagctgttcagtttgttcaggcgtcagagagaaactgaccgttctcgtatgtctcatgcgctgatcgccagactgcctgtctttcggaagctgagtgcatacctctttctcctcaagccccctccagtaatccgcttctttcagaaacgccttcgtatttgcgtattctttgattctctcagcaaattcggcgaatgaatgtgttttcggaggcagcgccggttcattgccttgtttcagctgcgtataaacggacgtgaagtcctccagtaaaatccgccaagatacaccatccacgactaagtgatggattgcgagaagaaggtggtctccatcttcagcccggaagagcccggccttcagcagatgtcctgtttccagtgaaatactgctttgaagacggtctgcttcccgttcgatacggtcctcatgatcttcagcaggtccgttcagctcaaagacgttcagttcaacagacgcatcctcaagccctctgtaatacggtttttgttcacgataaatcatccggagcgcatcatggtgcaccgtcaggacatgtaatgttttttctgttatctccggatcaaagccgtctttcgcatgaagcatgacggattgattccagtggtgtttgtccgtgaagtttttctcaaagaaccagcgctggatcggcgttaactccgcttcgccttcgacaggtccctgatcggcctgcttgccttccgtccgctccacataagagacgagctcttcgatggtcgggtgctggaagagatctttcatttccagcttgtagccgtgctggttcaggcggctcgccatttggatgcctttgatcgagtcgccgccgagggtgaagaaattatcgcttacgccgatctgatcaagaccgagcacttcctcccaaatgtcggaaagcagcgtctccatctccgtttccggcgctttataagcggcgcttcccgcttcaatgtccggttccggcagggcttttttgtcaatctttccgtttgcggtgaccggaagctcgtccatctccacccagaacgccggcaccatgtagtccggaagcgtgtctttcagcgcggctttgagcgcttcaatatcgtcctgccgaggcgcgacataggcgcaaagcgcggtattgcccgctttgtcttccaccgccgtcaccgctgcgtcatgaacgtccgcaagctgggcgaggcggacttcgatttctgaaagctcgatccggtagccccgcactttgacctgctggtcgatacggccgatgtattcgatgccgctctgcgcgttccatttgacgaggtcgccggtccggtacatgcgctcgccgggcacgaacggatctgcggtaaaccgcttcgccgtttcttcctcacggttcaggtatccgcgtgccagaccgcggccggccacgcacaattcaccggcaatgccttccggctgcacctgatcgccgtcgccgagaatataagctctcgtattggcaatcgcccgtccgatcgaaagcgatccttcctcaggattgatgacgccgcttgtcgcgacgacggtgttttccgtcgggccgtagttgttgacgatcgtgtacggctgtttcaccgcccgcttcagcttgtcgccgccgacgagaagcatgcggagagaggtattttccagctccataaattgttcggccagctgcgtcggcaggaaggtgatggtcacgccgtgctcctcgaaatagtgatttaagcgggtgatatccagccggatcgcttcgtcaatgacgtgaagttccgcgccgatggtccatgtcgggaacatctcccagatggaggcgtcaaaaccaaagcccgcgtatttggcgcttttatcatccgccgtcatggcgaatgcgtcgtgatgccagaagcacaggttcaccagcgcatggtgttcgaccatgacacccttcggctgtccggtcgttcctgacgtgtaaatcatataagcgagctgatccgccgttgtttcagtctgcgggttcgcttcatcgttttcatcaagcggcaggctcagaatggagcgtccgccgtcaagcagaatcgtatctcctgtgtagccatccggtacgtccagcgcttcctgtgtgagaagaagcttggcgccgctgtcctgcagaatgtagctgatccgctcttgtgggtagtcggggtcaatcggcacaaatgccgcgcccgctttcaggacgccgagtacgcccgcggccatttccaaggacggtttcgtcaaaatgccgacacgttcgtcagccgtgacgccgcagtctatgagaatgcgcgcgatccggttcgcccttgcgttcagctcgccgtacgtccatttcgcgccgttatatgccgcggccggccggttcgcgtatcgggcggccgtttcttcaaagagacggtgaaccgttttgtcctgcggcacagaaattgtttttcctttccatgcattgaggagggcttgtttttctgtttcattcaccaaggaaagctcagaaagcttcgcagccggattttccgttgcggcttttaacagttgaagccaataatgcttccacgtctctgccgtttccggtttaaacagcgcggtgttatattcaagcacaaacgttaagccttcgtctgtgtcctcagccgtcatcgtcaggtcaaacttggctgtttttctgtcaaacgggtggtgcttcagctcaattccttccatgaccagatcttcagcatttgcattttgcattgagaataccgcatcaaacagcggatttcggctcgtatcacgctgcacctcaaccttttgcagaaggtcttcaagcggataatcctgcgcgtcaaatgcatgtaaagcggtttgtttcacttctttaagatagtccgtgaacgttttgtccgcttccggatacgtacgcagcgcgagtgtattcacaaaaacaccgatgacgtttgcgagatccgcatgtgaccgtcccgcaaccggcgagccgacaatgatgtcatgctgtccgctcagttttgagagaaaggcgctgtacgacgccagcagcaccatgtacatggtagaatccgtttgtttcgcaagactgcgaagagccgacgtctgttcctcagtcagagaaaagaccagcttgtctccttcaaaggtttgcacggccggacggctgtaatcagccggcagcgtcaataccggaagctcgccgtcaagctcccgaagccaatgctcctcctgcttgcggtactgctctgattgaataaatttctgctgccataccgcatagtctttataatgaatccgcagcggctcaagcgtttcgccgccatacaagcgggacagttcatctatcagcacgccgactgaagcgccgtccgaaatgatatggtgcatatcaaacagcagcaggtggtcatgttcagccagcttgaccagccccgttctgacgagaggaagctgatccagacggaacggccggataaagctctgaataatccgttcagcatcttcttcagaggcttcataatattccatgtcgatataagcttccgcccatatacgctgaaccgtttctccatcctttatgtcaaatgtcgttctgaaggcttcatggcgttctgtcagctgtttcatgacggatttcagcttttctgcatcaagctttccttttaaacggagcacagacggcatgttatagcttgtttcagcgccttccagctgctgaagcacgaacatccgcttctgcggtgaagaaaccggatacgtttcccgctccgcagccggtgcgatgctctcagccgccttccgctcagccccttcaatcagctgcgccagcccagcagccgtcggagaagtgaacagatcctttaaggtaagctgcacgccgaatgtcttctggataagggccagcagtttcatccccgctaacgagtggcccccgatctcaaagaactgatcatggacgccgacccgttccatttgcagcacctcagcccaaatatccgccagtttttgttctgtttcattgcgcggcgccgtatatgacacggcattcgctgcggtcacatccggcatcggcagcgcccgcctgtcgatttttccgttccctgtaagaggcagttcatccaattgaataaagacggacggaatcatataagccggaagatccttcgccgtatgctccctcagctcccgggaagatatttccctgaggccgacaaaatacgcgcaaagaagtttgtcacccgcgccctgatccacagcgagcacaatgcattcctgaatctgatcatggctttgaagctgatgctcaatttcgccaagctcaatccgctgaccgcggattttcacctgatggtcgatgcgtccgataaactcgatatcgccattcggaagccatctggccaagtcgcccgttttatacatccgttcaccttccttaaacggatgctttacaaatttttcttccgtcagttcaggacggttgtagtagccttctacgagaccttccccgctgacgcacagctctcccgcgatacccgccggctgaatgcgtccggctgagttcataataaagacttccgtattgctgaccggtttaccgatcggaacggagagcgtatcctcttcaatgacatccaccggatggtatgtcgcaaacaccgtgctttccgacggaccgtacatatgaagcagttttcctttcccgactgccgccagcgcctttttgacatgttctacagacgctctttcgcccccgaacatgattttccgaagcgtcgtcagacaggacggctccatatcaacaagcaggtggaacagggccgtcgtaatcatcagaatgctgacgttctcccgtttgatcacacgggacaggcgcgacatgtccagcaccgtatctttcgggacgatcacaagctttgcaccgtttaacagcgaaccgaacatatcaaacataaaagcgtcaaagacgtagtttgacagaccgagcactgtgtcctcttcagaaacggtcaaatagttcgtgttttttaccgtccgcaaaatgttggcatgtgtgacgatgtttcctttcggcgttcccgtcgtgcctgatgtatacgtgagattggcaatcgttttggaatcaaacggcaatgctggattgcgagagtccttttcatagctcgcctcatcatcagcaagcacaatgacgccttgaaaaccggccttttccgcaagcggcttgaggctttgctgagtcaggagcacattcgccccgctgtcgcggaagaaatgctgaatccgctgaaccggatgctcaggatcaatcggcacataggcggaccccgcttttaacacagccataatggaaacaatcatgtccattgaccgttcacataaaacagccgcggttttcccgccgcctccgaccgaaagaatatgccgcgtaagcctgttggcgcgttcattcagctgctgatacgacagagtttccccttcgaactgaagagccgtccggtcagggttctttcgggcctgttcttcaaagatctgcacgatcgtttgctctttcgggtatgccgtgcgctccggattgaaccgctgtaattggttcaaagcctcccgttcagaaagcagatcatattcgctgattttcgcatccggctgagctgccgcactctccagcagacggacatagtgcgcaagcatgcgatccgcagttgagcgcttaaacagcttcgtgcaataatccaaatcgagcgcaatgccttccgctgtttcccgggcctgcattgtcagatcgaatttagcgatattgaagttggtttcatgaagagacagcgtcaggttgccgatctccggaattccgtccgaagcattttgcagactgaacatcgtgtcaaatatcggatgcctgctcatgtcccggggcacgttcagctcctcggtcagccactcaaacggataatcctgatgggaaaacgcgtccagcacctgtttgcgcacatgacctaacaagccggcaaatgtctgatcctgcttcacggagcttcgcagcgcaagcgtgttgacaaacatcccgataagcccctcggtatcagagtgatttcttcccgctgacggtgttcccacgatgatgtcttcctgtcccgaatacttagaaagcagcgtatagtatgccgataacagcaccatgtaaagggtggctccgtttttctcggcaagcttctgcagccgttcccgcagcattttcggcagcttggcggacacgcggtcaccttcaaagctttgcacctgcggccgcggataatcagggagcagctgaagcaccggcagttcgccgctgaagacttctttccagtacgcccgctccttcttgtagccttctttcgcccgttccgcctgccatacggcataatctttatattgaatgcgcaattcaggcagctgatttccgccgtagatgtcagccagttccttcagcatgatggaaatagacaccccgtcagaaatcaggtgatgcatatcaaacagcagcatatggcgattgtgaccgagcgtttgcaggccgattctgaacagcggcgcctcagataaatcaaaacggcgcacaaagtccttcatgacctgttcattcgttcttccgcgcgcttcgagcatttcaatatgaaacggaacatgttcgtgaaccacctgtctcggcgtgccgtcctccgattgaaacgatgttctgagcgcttcatgcctgctgattaaggcagaaaatgcacgctcgagcttttcaaggtctaaagcgccctcaatcacggccgcagccggcatgttatatccgactcccgcatcttcaaattggctcgcgatataagtccgctgctgagcgagcgaaagcggatagctcgcctgcttctcagccggctcaatcgccctgaatgccggtccttcgtttcggttttccgcataatcggcaagcgccgcaatcgtcggatgctcaaacaagtattgcagcggaatttcaacgcccatttgcttatgaattttcgtcagaagcgtcattgcctttaatgaatgaccgcctgactcgaagaaatgatcataaatgcccgccttgtccattccgaggacttcctgccagatgacggtgagcgtttcctccgtttcgtttctcggcgcggcatattcggatgagctgacagcctgcacatcaagcgcaaacagctttttgcggtccgccttcccgctcggcgtgagcggaatttcgtccgtttttgtaaagtaagcgggcaccatgtaatcaggaaggtgcttggacacatactccctgtactcggcagggtgaaactcggttcctttttcctgaacgatatatgcgcaaacatctaagctgccctgctgatccggccgtgccagcacgacggcctgcgccgcccccggagcttttctgagcaccgtttcaatttctcccagctcaatacggtagccgcggactttcacctgatcatcttcacgtccgatatattcgatcgtcccgtccggcagccagcgcgccatatcacccgtgcggtacatgcggccgcttccgttaaacggatcttgcaaaaacttctctgcggtcaaatccggaagatttaaatagccgcggcctacaccgtcacccgcgatatacagctcaccggccgtgccgtcgggctgaagccgctggtgcttatccaatatatacagacgggcgttgccgagcggttttccgatcggaacgtacgccgcctgttgattcattccgttatcggcggacacctgatgcacggacgcatctacgcacgtttctgtcggcccgtagacattcgtcagacgcggcgccctgcccgattgatgaaagaggttcatcagctgttcagcaacagcggcggacaggccctctcccccaatgagcatgtggcgcaattcaattccgctgacatctcccgccgcaaccatcatctgcagatgcgcaggggttccgtcagtggcttcaattcggttttgacgataatagtccagcagtgccgagccattcgttacagtcgttttcggcacgatataaagcgtctgtcccaaaagaagcgaggcaaaaatctgtttgacggacgcatcaaaatgaaacggagccaaaagcgccattcttaatgtctgctcaccgcattgataaatctcctgctgcagtgattgcaccagatgatgaacttgccggtgctcaatcatcacgcctttcggccgccccgttgtacctgacgtgtagatgatgtaagccagccggtctgattgtgtactgacaccgtccgcagccgtttcaaactgaacagcctcgtcaaaatcaatccgttcggcatccgctgcaggcgcctgtattccggcctctgtcagaacagccttcgctccgctgtcctccaaaatgtactgaatccgatccgccggaaagtcaggatctatcggcacataggcgccgcccgctttcaaaattcccaatattgccgcaataacacgctcagaacggccaagcagcaccgcgacaggagaatcggctgatatcccggctttaagaaggcgtccggcaattcggcctgactgttcatgcaatgtgcgataggacaatgttcggccttcatacaccaccgccggtttgtcagacagtgacttcactttctcttcaaacagccccggtatcgtcatctccccgcggtaattcaccggattaccggaggcccgtgtcagcagccgctctttctcggattcagaaagaagagtaagctcatcaattatgcgatcaggagatgaaatcgcatcttcaatcagcgtgatcaaacgttcagaaacagatacaatctcctctcccttgaatatgtcgctgcgatagtcaaaatcaatcgtcaatttcccagtgtcccatcgttccttcacatgaatcgaaatatcatttgtaccgcttccgctgaaaatagggtctgtcaggaaggacagattctcttttttctgccactgcatcacctggtactccagagccaccgtaaacaatctgctcagcgaacttttcgaagcgcgcaaatcattgacaagcaggttatacggatacttttggtggcggagaattttcatcagatccttcatccggcctttaacgaattccaagaacgactgtcctccgtcaacgcttgtccgcacaggaaccgtagatacgaacatcccgagcatctgcttttctttcgcattcgtccggtttcccataaacgtacccgtgacaacgtcatcccggccggtcactttgtagagataagtgatcaaagctgattggaacagagatagtacgctgactttatgctcctcgcagaatgaatgaatgcggccgtataagtcgtgaggaatttcttgagaaaaccgtttcgcatcaagacccgcatctgcctggctccgtttcagggacacaagctccggcacggtctcgaactgcccgttccaaaaatcccgatcctttttaaaccgcttcgactgcacatattcctgctcagtcagcacatgctcgataaaggaaggaatctccgtctgttccatacttgctccgcccgaaagctccaaataaatatcagtaatcgcattgcccagaatcgtcatggaaatcccgtctgaaataatgtgatgcacattaacgtaaaaccagacctcattttcgctgatggtatacacggaaaaacggaataaatcctgatcatataatgccagaggcttgcttgcctcgtcacgtccccattttgacagctcttccgcagagcagccggcttgcctgatgtctgtatgttcgatagtcagcggacggtaatcgctcacatattgaacgggctccccctcatcatcaagccgcagacggattctcatcgactcataccgccggacgaattcctgtatcgctttctcaacgtaatgagcctgtacgccgtcgtcagaaatgagtttcccgaacccggcaagatttgaaatacttgtgttcggatagaatttttctgtataccagatacgtttttgagcatttgttaaaggataaaaagttatttccatatgtgtgcgcctcccctttttaagataaaattgtcaattctcccttagaaacagcctccctcaatgtccctaactcattatcaagccaaaagaaccacttacctccaaaacgatcccgattcaatcaccgccgaaatccgcaatccactcacccgcacagtccgaaatgcggctcaaatttatgagaaatcaagacaagaatccaatgtttgtaagcaacagggtttacctatttcttcatgaattactatatatctacttacgttcactttatatgaaattattgtttttatcaccgaaaaatgggtgaaaagtttcattcggcacaccgaaaaaaattccgacaattccagagggtattttgcggcatcccgcaatttatttttaaaaatattatttatgtaaaattaaaaatctttaaactatagtataaatctctcgaatatccagttatggcagaatgaaaatagttttcatatatgagctgatggggaaaaaacagcgcaagaaccgaaacaggagatttaatcgttcgcaatatgatttcattaaaccgcaaaaaaagcactctattttacatagagcgcttcaaaaagattcctttattgcagttttatcaatgttgattaattccatatattcttttccccacttatacatggcgtccaaaatcggcataagggtctctccttgctccgttaatgagtactccactttcggagggacgacagggtaaacctccctgtgaacgatcagatcctgctccagctccctgagctgattcacaagaattttgtgcgtaatatccggaattaaagctttcagctcattaaaccgctttgttccttcttttcccaggtgccacataatcagcattttccacttcccgcctatcacggcaagcgtcaattccttttcgcaattaaacgttttctcatccattcggctcacgggccattctccttcctcttactttttgtacgttcatcatctattcatacacgcttacttttttacacaactttcatcagtttatactaccacgcagttttgctgaaacaaagcgcattgcctgcggggacagtatcctcaaagtaactattagacttcaaagtgcgtacttctcaacatgcggggcactctatagaatgtaaatacatgaaaaagaggagtggatataaagtggaattacagctggcattagacttagtgaatatcccggaagcaattgaacttgtgaaagaggtcgaacaatatatagatgttgtagaaatcggcactcccgttgtcattaatgaaggcctgaaagccgtacaggaaatgaaatcagcctttcctcacctgaaagtgcttgccgatcttaaaatcatggatgcaggcggctacgagatcatgaaagcggcagaagcgggcgccgacatcatcaccgttttaggagcgacagacgactcaacgatcaaaggggcggttgccgaagcaaaaaaacagcagaaaaaaattctcgtcgacatgattaacgtaaaaaaccttgaaacacgggcaaaagaaattgaccaactcggtgttgattatatttgtgttcacacaggttatgatcttcaagcagaaggaaagaattcattcgaggaactgacggcgattaaaaaagcggtcaagagcgctaaaaccgcaattgccggaggcattaaacttgatacgcttcctgaagccatcaaacaaaacccagatttaatcattgtcggcggaggcattacgggagctgacaataaagcggatgctgctgctaaaatgaaacagctgatttcacaaggatcatgaaaacgactgaatacttacatgaaatactcaatgaaatatcccgcaccgcagcattaatagccgacagtgaagctgacaagcttgcagatgagattttatcggcagatcaaatcttcacgtccggagcggggcgttccggctttatggctaaagcgttcgccatgaggatgatgcacatcggcctgaacgcttacatcgtcggtgagacgcttacccctcccctccaagaaggcggtctcgtcatcatcggctcaggctcaggcgaaacaaaaagtctgcttcatacagctgaaaaagccaaaagccttaacggcatcatcactgcattaacgattaaccccgattcaagtctcggcaaacttgcggatcttacgataacgattcccggctctcctaaggaagagaccggcggagacagaaagacgattcagccgatgggttctttattcgaacaaactcttctgctgttttacgatgcggttattctaaaaatcatggagaaaaaagaactgaattcagcagacatgtttacaaagcatgcgaatctggaatgatttactgacggccttcttatcagatggccgtctttttatcgtcttgttgcgcacggtcatgcaggccaaggttttcgggtcggacactcgcagacgaagatatcctgccggtgagcttatcgctataataagtcaattgacgatacggccgcaaccgttcatttctgaatagggaaacggcaaaaaacactttctgatcggatatttaatgaataaaattgatttgtgcggatggttttacagatattcagctgaattgcggctgagaaatatattttaacagctttacagccggccgattctgctttattcttggaccagctttacagcaatttaaaactggaggtgattgatactcttgaaaacattaaaagcactgctgcttgttcttatcatcattgccggagcagtcgcggccctgatcaagggtgatcttttctcagataacgagcagaccgttcagaagagtgattacgacaaagtaatcctatttccgtccgatcgatatccggaaacagcaaagcatattaaggacgcgataaaagaagggcattccagcatatgcaccattgacagagacggagtacataagcggcgtgagcaatctcttaaacatgtgcctgtcaaaacgggatacgatagggatgaatggccgatggcggtttgtaaacagggcggaaacaatgcctccgtagaatatatttctccggcagacaaccgcggagccggctcttgggtcggacaccagcttaccaatgatcccgacggaacgagagtattatttaaaatcaagtaaaaaaacaggaggaacagcgcattgaataaatcatggaaaccgcaagaactggccatttcgtatcatcaatttacaatcttccaaaaagattcagaaccgcctgttatcgattggaccgatgaagccattgaaaaaggatatgcggaagctgacggagctgtttcattcgaagcaaggagaaatacgagggcatttatcgtcttcaggcttaacacaagtgaaccggtactatcctatgagaaaaaagcgactgttccctttgaggctgtaaaagatggaattgagattgaaagcgtgatgtcaaagcggcttttctttaatattccgaaaggccgatacagccttacctgttattcagtgcctgccgaaatatccgatcttcatgcggatacgtatattattgatgcagacgcaatgtaaaagaaacccctgagagaatcatatttctctcagggaacttttataaacttttaccgtttgtttcaattacattctggtaccaataaaaactgttttcctgatccgtttcaagtctttttcatcttcttcatctcgattgatatacacaaaaccgtagcgtttttgatagccgttcagccagcttaaacagatccgtgaatgaccagctgcagcagccgatgagatgaactccgtcactaatagcctctctgcacagttcacccatactgaaggtcctttaccgtcttattccaagctccttcaacctgataggcagccgaagctgacccccatagaaatgtatcagggaacagaccctgttttttatgtatcatgtgtttcatcctcctgatgcgtatgatattgatatcatacgttttgaaacgcatttcagagcaatcccgataaaaacaaaaaagcatccggcttgccggatgcttaagaatgatgatgccgcttttccaatttatgaggcggaggcttcgggacaaagccattttgtttcatcatattaaagcgcctgtccatatgctgtttaatatgttctgctttttctttcggcaggaccccgtactcaacatatttggatatgacatgtttgcgtttttcgagcacttctttttcaagtgattcaatttcttttttctgctgttccgtgagtgacattgttgaaggcatttttgtttcggcgtgtgccggcattgtgaaaaccattgctgtaatgaaaaacgcagctaaagacaatgcagcttttttcatgactctttcctcctttaacgtttgttatatgttgctccctcatccattttttatgcaaaaaaagagcgaaattattcgctcttttcaatcgattcgtccggcagtgcgtatgtgacatacgttcccgctacaaaatcgtggattgaccgtttgtcttctctcattccgaccatgaatgcgctcacgatcacaccgattccaaacgtcacgccatatatcaggccgcccacaagcactctcaaaatcatagtaagaaagcctgcctggtttccgtcttttttgacgatgcggataccgcagatctttttgccgataacataaccgttccagtatacagggagcaaaataccataaagagtcaaaatgatgctgatcattgcgctctcattcgggtcttttcctgttgccagcataaaaataatcgccaaaggcactgaagtaattaaatagtcgagtacaacggctcccaatctgatccaaaatcccgccggtctgtaaatattcatcatgtttcccctcgctatggcttcaaaatcactttaatgtcgccatcttcttttttgtcaaatatatcatatgcagcaggagcttccgcaagactcattttgtgtgtaatgatatccgtcggatcaatttcattttgttcaatcatttgatacagcatcggcatcagatgaataacgggtgcctggcccatttttaaagaaacgttgcgtgtaaaaaaatcaccgagcggaaagccgtccgcttcagaaatgtatgcgcccgtgagctgcacggttccaaacttcttaacggcttctgatgctataagaatcgggctgatcgttccgaactgattcggtttttgctctgctttttcttttgaaagcggcgtgccgtccattccgacacaatcaatcactacatccgcgccccctgacgtttgttcatgcagcagtttcccgatctcatcatgttctgaaaaattgaaggtctctgctccgtttatgcgtctcgcatgttcaaggcgatgcgggacttgatcaactgcgataacccgtttagctccttttttccacgcgaatttttgcgccattaagccgatcggacctgatcccaaaataacgactgtatctccttttttcactccgctgtgctgaacgctccaaaaggcggtcggcatgacatctgacagaagcagcacctgctcatcttcaagctcactgtctgccggaaccagaaaagaagagaaatcagcaaaaggaacacgtaaatattcagcctgcccgccgggataattaccgttaaactccgaaaaaccgaataaaccgccggcatctgtatgaggatttggatttgattcatcacactggctttccatctggtgcttgcagtaatgacattctccgcagccgatgttaaaaggaatcacgacacggtcgccttttttcagctttttgacttgactgcccgtttcttcaacgattcccatcggctcatgcccgacaatataacccggatcggcgggtattccgtttttatataaatgaaggtctgaaccgcatatcccggttgcggtgattcgaacgatgacatctctctcatcttgaatggcgggtgccgggacttctttcacttccatatgttcttttccttggtatgtcaatgctttcacacttggtcagctcctttttcatcactccttcccttttcacctgcttctaaacttggccggtatgttattcggcccgctgaatatcccattgaaaaggatcttcaagctgcgaccaatcagaatcgaactcagactgcgtgagcaggcactgatccaattcctttgtaatggcggcttcatctaaatctgttccgataaacaccaagttcgtatgacgatctccgaattggtcgtcccaatcttccagaatctccggttcctgctttttgatctgctcctgctcaagtttcggcattgccgccacccaataagaaacaggctcaatcgaaaccgccggacccgcctgagacatcagcagcgcaaggctgttgcgggttgcgcaccaaacaattccttttgcgcgcacaatgttgtcaggcattgattgatgcagccagctgtcaaaacgaacggtatgaaacggcagacgccgcgagtacacaaacgaagtgatgccgtactcttccgtttccggagtgtgcgcttcatgacctgccgtcagttcctttatccatcctgctgatgaactcgcttcctcaaactcaaataaaccggtattcaatatgcattcggcgggcacttctccgcgaacggaccggatcagtctggcacggggctgtaatgcgcgaagaaccgtttccagctgttcaagctctttttcgcccaccatgtcgcatttatttaaaatgagcacatcacaaaactcaatttggtcaattaataaatcggcaatctcccgttcatcctcttctcccgccgcttccttccggtcaagaaggctgtcaccggactggaaatcatgccagaagcggtttgcatccaccacggtcaccattgtgtccagcctgcagaatgttgtcagatcaatgcccatttcttcatctatataagaaaatgtctgggcaactggaatcggttcgctgatccctgttgattcaatgacaatataatcaaacctgccgtctttcgcgagtttctcaacttcgactaataaatcttcacgcagcgtgcagcagatacagccgttggataattctacaagtttctcatccgtccttgacaaaccgcctccctgcttcaccaagcccgcgtctatatttacttcgctcatgtcattgacgatgacggcaatttttaaaccgttgcggttttgtaaaatatgattcaaaacggtcgtctttccggcaccaagatagccgctcaatactgtaaccggaatttttttcatatcaatagccccctgataaaatagaatgattacgatttatatctcgcaactgccttattttcatcatgatgtacatagttttaaatcgcaatcgttactatttattttgatgtattctccgtttaaaatcaagtaaaagtcagacacatcacacgttgtttgtccccatccattggtctgacacgcaaaacgtcaacgatttaattggtgaagccttggatccggactgtaaaatgcccggttttaagatgtgtgcggtacgaatcatccctatctaattttcataaaatttttagattttttcgtattttttgttacatttcataacatgcatcttaaatatttgtttttgctgtgctacgctgaaaaaaacaaagataaggagcggatcatctgatgggaaaaaaacagctagtccttgttggaaatggaatggccggggtaagagcgattgaagaaatactgcgtgtttcaaaagacgaatttgagattacaatattcggggccgaacctcatcccaactataaccgaatccttctgtcaaaagtgctgcaaggcgataccgacattcaagacattacgttaaacgattggaactggtacaaagaaaacaacattcagctgtataccggtgaaacagtcatcaaagtcgacacggaaaaccaaaccgtcatcaccgatgcagacagaatccagccttacgatgaactcatcctggcgacaggctctgtcccttttatccttccgattccgggcgcagacaaacaaggcgtcacggcattccgagacataaaagataccgacacgatgctcgccgcgtcaaaacaatataaaaaagcagccgtcatcggcggaggactgctgggtttggaagccgcgcgcggactgctgaatctcggcatggacgtgtctgtcatccacctcgccccattcctgatggagcgccagcttgacgcagcggcgggacgcctgctgcaaaacgagttagaaaaacaaggcatgacatttttccttgaaaaacaaaccgaagaaattctcggtactgaccgtgtcgaaggcgtacgctttaaagacggcacaagcatcgaagctgatctggtcgtcatggcggtcggcatccgcccgaatacacagcttggcacagaaagcggcatcccggtaaaccgcggaatcattgtcaacgattatatgcagactgaaattccgcacatttacgcggtcggtgaatgtgccgagcaccgcggaatcgcgtacggtcttgtggcgccgctctatgaacaggcaaaagtgctggccaaacatatttgcggcattgaaacaaaaccgtacgaaggctccgttctctccactcaattaaaggtatcaggcgtcgaggtcttctctgccggcgactttgatgaatcagaggacaaaaaggcaataaaagtgttcgatgaacaggacggcatttataaaaaaatcgtcctgaggggcaatcaaattgtcggcgctgttttgttcggagacagcagcgaaggcaaccgcctgttttctatgattcaaaaagaagcagatatctctgaaacctccaaaatatcaatcttacagcctcttgatcaggaagcaggcgtaagcatgaccgcggcgatgagcgacgatgaaatcatctgcggctgcaacggcgtttcaaaaggtgccattattcaagccattcaggaaaaaggctgcacatcaacggacgaaatcaaagcatgcaccggggcatcccgttcctgcggaggctgtaaaccgctcgtagaagacattcttcaatatacactgggctcagaatttgactcatccgcgcaaaaagaagcgatttgcggctgcacctcactgtcgagagatgaagtcgtagaagaaatcaaagccaaagggctctcacatacgagagaaatcatgaacgtgctcggctggaaaacgccggaaggctgctccaaatgccggcctgccctcaactactacttaggcatgattaatccggctacatacgaggatgacagaacatcccgttttgtgaacgaacggatgcacgccaatattcaaaaagacggaacatactcagtcgttccccggatgtacgggggcgtaaccaactctcaagatctccgcaagatcgccgatgtcgtcgacaaatatgagatcccgctcgttaaaatgaccggcggccagcgaattgatctcatcggcgttaaaaaagaagatctgccgaaagtatgggccgagcttgatatgccgtcaggctacgcgtacggaaaaacactccgcacggtaaaaacgtgcgtaggcgaacaattctgccgcttcggcacacaagactccatggcactgggtattgcgcttgagaaaaaattcgaagggctcaatacgcctcataaggttaaaatggccgtgtccgcctgcccgcggaactgtgcggaatcaggcattaaggaccttggcgttgtcggcatcgacggaggctgggagctttatgtcggcggaaacggcggaacccatttgcgcgccggtgatttgctgatgaaagtaaaaacgaatgaagaagtcttagaatacgcgggtgcttaccttcagtactacagagaaacggcaaactatctggagcggacatccgcatggcttgagcgcgtcggtttatctcatgtccaatccgtattaaacgatccggaaaaacggcaggagctcaacgacagaatgaatgagacactctctgtccacaaagatccgtggcaatacttccttaaagataaaaaagcttctaaagatctattcgaaaatgtcgtcacgacttcataaaacagtaagggggaacggacatggttaataaagatatgacaaaggtttgcataggcaatgtaaacgaattacccgaggagttaggaaaaaccgtatatatagaagataaagagcttgccgtatttaagctttctgacgggagcgtccgcgccgtcgaaaaccgctgtccccataaagagggcgtcctggctgaaggcatcgtcagcggagaatacgtcttctgcccgatgcatgactggaaaatttccttagaagacggaaaagtccaagagccggatcatggctgtgtcaaaacatacgaaacactgatcgaaggagagaatgtatacctcctgtattgatcaaagaccggatcacttttccaagtggtccttcattttttaaattgctgaagggatgacgccatcatgaaaaacggaatcgtatactttgtcggtgccggaccaggagacccggggctgatcaccgtaaaaggaaaacaggctctggagaaagcggatatcattttgtatgaccggctcgcaaacccaaagtttctagaatacgcctcaccggactgccggttcatttattgcggaaagctgcccgaccgccattttatgaaacagtctgagataaatgccctgctgatagaaaaagcggcggagggctacaccgtcgtccgcttgaaaggcggagacccaagtgtgttcggcagggtcggcgaagaggcagaggcgcttcatcagcacggcatccgctacgaaatggtgcccggcatcacctcgggaattgcagcgccgctgtatgcgggagtccccgtcacccatcgtgatttcgcttcgtccttcgcgatgatcaccgctcatgatacatcattgcacggcaggccgaatctcgactgggaagggcttgcccgaagcgttcaaacgcttgtgttttacatgggcgttaaaaatctgtcatttatatgcaggaagcttatggagtacggaaaatccccttccgttcccgtactcgtcattcaatgggggacgtggggacggcagcggagcgttaaaggaacgcttcaggatatccatgaaaaagttcaaagccaaaacatcaccaaccctgccattatcgtcatcggtgatattgtcaattttcaaacacacagctggtttgaaagcaaaccgttcatcggacggcatatcatggtggtcactcatggggatgatgaacatacattgacagacaagctgcgcgagtatggcgccgatgttattgaatggccgaagcggatcgttaaaaaaatgcccgcaaacgaaaacatcctgaaacagatcagcacctttgaacaactatttttcacatcacgccttgcggtatgcgaattctttgacacactggctttcaagcagatcgacatccgccgggtgaccgcaagcctgaatgcagcgactgaagccgcaaagacggaactgacaaaacggggctttctcctatccgaatggcaaaatgattctccgcattctctcattgtagggagccgtcaagcagcagaaaacttgccagactcaaaatcatgcctgttttatatcacccatgaacatatcgcggatgagcgattcacttccatgatcgaacgcacgatcagtgagtcacctctgcaaatgattatctgtacgggcaaagaatccgctcagcatttgatcagcgccggaaaacaaatcggcatatcaccgaacccgagaggaaaccgccctcccgtcatctgcatgggcgaagacctccccgccggctgcgggtttaccgccgtgaaaaatcaggaacagttatttgcgtttatacgaaatgaaatgaaagacatgctcgttcacagctgatacgccggaatgcttttctgacccccggacccagcatcggggggcagcccttttttattgtgtcaccaattttttatgatgagtcgaatacatcgccatctgatccgcatgcgggtccaaataggctttggcgctgttcactgcggtcggcccctccgtgaaaccgccggcaatcagtctgagcttgctttcataatgggcggcgtcaccggcgacaaacacgcccggaagattcgtgcgcatatgcctgtcagctttaatcctgccttcttctatctcaagcccccagtccttcatcggaccgagatcaattttaaacccgtggttgataatgagctcatcaagcttgatgacttcagaaagtccggactcagtttggcaaacggtgacgctctcgatccgttccccggtgccgttgagatgcttcagacgatacggcgcaagcacccgcacggaagaccgcttcattttcgccacgctgctttccaaaccgccaaactcctcacggcggtgcaagacggtaacagacgccgcaatcggttccagctcattcgcccagtcaaccgcggtatctccccctccggaaatcacgacatgcttatctcgaaacgcatcaagcttctccaccttataatgaaggttctttcctgaataacggctcgcatccgcgctgtcaagttcattgacctcaagcgtccccatgccgacggccaaaatcaccgtgcgcgtatagtgcttttccccttcggaactttcgagcacaatggttccgtcttccagccgttcaaatccggccacccgctgattcaacacgatatccggctcaaatgtcgccgcctgctccttcagctgcttaatcagctgttccccggcaatcccgggtattccgccgatatcacggatgattttttcaggaaaaaacatagacacctttcccccgagccgcggcaaaaactcgatcactttcgttttcagctcccgcatcccgcaataaaaagccgcaaacaggccgatcgggcctccgcctataatcgtgacgtcgtacacctcatgattttccgccatcgttctgcctcccgtttatatctatacttcatacttttttaattgagaatcaatatcaatgaaagtataacatatattgaggagcagtgtttattcatttctcatcttgcgggaaaggagtgattcagaagtgaggttctgagattgataagcgggaaggtattaaaactgaaaccagtacggcgactggtttcttttttatctctttttcatcagcatgatatcgagatacagctggcaccttgtcctgaagtcgtttaaattaattgatgtcatgtcaagaatctgtttgatgcggtagttcaatgtgttttgatgaataaaaagctgttctgcggctggttttgttttgcagttattgaggagatagatttctaacgttttcagcagttcggtgctgctttctctgtctttggcttttaataacgctaaatcatcgtttacatattccagtgaggcgtttttttcttcgatgctttcaagatagcggtaaatcccgagcttactgtattcgtacgggatattttcctggtttccggtaatttcggcggcctttataacttcaagggcttctatataacttttgccgagcttcaggatgctgctgtattcattgccgattccgatatagatgggagtggggatcttctgaaagtgaaaatgagtcagcagtttgtggatgaattcagatgctgccgaagtgccggagcttttttgcgagaagcttgcgacgacgatgacaatattggaatcaatggttaagacgtggctgactttatcccgcaaattcaagtacgatttgatattttcctttacatcttcgactgcctccccatccccatttgcggcgtgcaggacgactaccgaaaaaaccgacggcagcacggcgttcatcttttccgcttcccgcctgaactccttttcagaggagaattgctgaaagatcgcccgtttcaccaggtcttccgctctctcttctttttcctgtttcagccggttcgttttgtagatgatttttccgacatggaatgaagtttcatataaaaaatcgagctcctcgtccgtcaagtttcggtcgagctcctgaatccagatgtagcccatcacttcccctttatgttttgcgcttacaaccactctctgattcaatccgatactgtctattttttcgacacggaacggttcaggaacggttttcagcttttcgatcaccccgtccttcagaaacctttcaaaaatctgcacggggcatttttttgagaatatcgtctgctggttggcggagtcgaagtgattaatgtaataagaattataggcaagcaaaaagaaatccgcgctttccagaataacgggcttctgcaattcataactgatgaaatcaattaatttatcaatgtccgtaaatgaaaaaactctctctaaaagctcttccatacctatttctcctatgctctttttatctttatcatactctgaggggtgactttttgtatagaaaaaaattcatatactcccaaaacggaatgatccgaaagcctgtatcgtgaaaagaggaaaaagggcggtcccttcttcctctcgttccttgcttttattgagaaagtgtatcacggtagtcatgaaactgatctgtgacatcttttgacggagcctgtgtcaataagctgacaacaaatacagcggcaaggcttacagcaaagcccggaatgatttcgtacaaaaagtctgaaagactggcattcgcccaaatgattacggtaatcgctcccgcaatcatgccggcgagtgccccccatttcgtcatccgtttccaaaataaactgagcagtacgaccggcccgaatgaagcgccgaatcccgcccatgcatagctgacaagaccaagtatcgtgttgtttttctcccaggcgagcaccaaagcgatgattgacaccgcaagcactgccattctccccagaaatacgagttccttatcagaagctgaacgcctgaacatggacttatacaaatcctctactaaagaactggacgtaacgagcagctgagacgaaatcgtactcataatggccgctaaaatcgcagaaatgagaaatcccgtaataatcgggtggaacagaatgttgccgagctgaataaaaatggtttccggatcagccagcttcaacccgcgctggtggtaatacgcgattcccgcaagacccgtaaacagcgcgccgagtgcagacaaaatcatccatcccattccgatccgtctggcgcgtttgatctctttcacagatgtgatcgccataaaacgcacaataatatgcggctgcccgaaatagccgagcccccacgcaaataaagaaataatgccgaggacggtcgtccctttgaacatattaaacagttccgggttgacggaacggatatcggcaacggtttcccccgggccgcccgtatggaaaatcgtcacaatcggcacaagaataagcgccgcaaacataatgatcccttgaacaaagtccgtccagcttaccgccaaaaagcccccgaacaaggtgtaggcgacaacgacgcctgtcacgacccacagtcccgtgtggtaattcaaccctaaaatgctgttgaataagacacctccggacaccatgccggatgatacgtaaaaagtgaaaaagacgagaatgacgagacccgaaaacagtctgagaagcttcgtatgatcaccgaaacggttttcaaggaaacccggaatggtgatggaattccccgctttttcggtatacgttctcagtctcggcgcgacgaaaagccagttcgcccacgccccgagcacaagtccgatcacaatccaagcgccgcttaatcccgttgagaacatggcgcccggaagccccatcaagagccatccgctcatatccgccgcccccgcgctgagcgctgtgacggcagggcctaaagaacgccccccgagcatgtaatccgtcagatttgacgtccgtctgtaggcaaaataaccgataaacagcatgcccgccatataaatacaaatggaaataatcaactgaatgtttgctatggcatttcctcctccgctttatatgtttatggtgaaatggacacccccgcgaggaggatgcccattcagtccctcttaaaacatttcactgattgttttcgcctgcatgtgaagggccaaataatccgggccgcccgcttttgaatcagtgccggacattttgaagcctccgaacggatggtagccgacaatcgctcccgtacaattgcggttgaagtacaggttgccgacatggaattcctgtttcgcccgttcaatatgtttgcggttatttgtaatgaccgcgcctgtcaaaccgtattcagtattgttggccacttccagtgcttcatcaaagtttgatactttagaaaacgccacgaccggcccgaaaatttcttcctgcatgagtctggctttcggatcaaggtcagcgaagatcgtcggcttgataaagtagccttttgaatcatctccggtgccgccgcttactaaacggccttcttcttttccgatttcaatgtagctcatgatcttgtcgtaagaaccttggtcgatgacaggtcccatatacacgtcagcgctgtcagggcttgccgtcacttttgattcagtgatttcgatgacgcgctctaatacttgatcatacactttttcatggacaactgcacgtgaacctgcagaacatttttgtccagcgaagccgaatgctgatgtaaagatggattgagccgccaattcaatgtccgcgtcctcatcgacaacaaccgtatctttaccgcccatttcagcgataacacgctttaagtgctgctggcccggctgcactttcgccgcgcgttcgaaaattctcgtaccgacttcacgtgatcccgtaaacgtaatgatgcttgttttcgggtgatcgacgagatagtctcccacttccgctccgcttcccggcacaaagttgacaacgcccttcggaagacctgattcctcaagcacttctacgaacttcgccgcgatgaccggtgtcgcgcttgccggtttaagaacgaccgtgttgcccgttacgatcggtgccaccgtcgttcccgccataatcgcaaagaggaagttccatggcggaatgacgaccgttacgccggtcggtgtgtagacatattggttcttctcgccttcgcggctgttgaccggcttgccttttgccaattcaaccatctggcgcgcgtagtattccataaagtcgatggcttccgccgtatccgcatcagcttcattccaaggctttccggcttccttgacgagcagggcggagaattcgtgctttctgcggcggactttggcagccgcgcggaacaaaacggcagctctttcttcaggggatgtgtatctccactcttcgaacgctttcgcagccgcttcaatcgcctgctcagcgtgctcctgggacgcctttgacacttttccgacgacttcttctttgtctgcagggttaatggatacgattttcgcttccgtctctaccttttcaccgttgatgacgagcggataatcttttcccagatactcatttaccgtcgcaagcgctttcttaaattcttcaacgttcgattgatcttggaaattcgtgaatggttcgtgtttataaggtgtagtcattgtcatctctcccttttttacttcttagtcattcctttaaaggcgaatgcgatgtttgaggggcgctcggcgagccgtctcatgaaatagccgtaccagtcatccccgtaaggcaggtagactctcatacggtatccttcttccaccaggctgagctgggtttgcgagcgcatgccgtacagcatctgaaactcaaaacggtcgtttggaatgccgtgctcttcggcaagctgttttgtaaactcgatcattttgtcatcatgcgtggcaactgccgtataatgtccttttaaaagctgtttgcggatgagtcttttataattttcatcgacgtcgcttttttcaggataggccaccttttccgattctttataggcccctttgacaagccgcagaaacggattcagcgggctgaggtcatcaagatccttctccgttctgtacagataagcctgcaccacggtgcttacatattcataccggctccggaagtctttaaagatatccagcgttttctggcatctcgtttcatcttccatgtcaatcgtcaccatgactttatgtttttcagccgtctggaggattttcgtcatattttcatagacgagatcaagatctatatcaagacctaaagacgtcatttttaatgacacttgggaattcagctgttcatcagcaattaaggcgatggtctgcatgcactcctcggtgcgttctttcgcaacgtcaccgttgttgacaaattcccccaaatgatcgacagtaactgacagcccctggctgttcaaatgtcggattgtcgggatagaactgcggaaatccattcctccgatgattttgccggctgccacacggcttccccagcttcgcgccatcttattgagaaagctgctcttggataaaaataagaaaaaatctcttgtaatcacttccaaccttaacaccccgcaatctaagaagtatttgtatgagtctattgtaaatggacaaaacatcctctcacaatattctaaaaatacaaagattctgataaatttttgtggttttaccacaatcagcttcttagatagcaggcggattatgccgaaaaaaggcggacggaaatgacggcaatcgtcaatttccgcctttttccccccacgcctcttcgacggtctgaatcaatagctgattcagttcctccgttatgtcaggtttcggtgttttgatcgttttgacatagtgcccgatgcgttctatttcttcttctataaacgcgtgaatgatcatatttctcggttccggagccagctcctgaccgctttttttccttgtaagcagtgtattgatttcagaaatgagcgcttcatccgtcaataaggcatcggccagtacgggaaatgacatcggcggtacggagccgaacgtttcaatccatctgcaggcaaggagaggacgcaaaacataaaaatactttttaatcttcacttcactgccctgcaattccgttttttcattccgttttgccatattgagataatgataaatgccggcttcaggcgaaaaggcgcggattttcagttttcgaagcttttcagccgctgagaaagcttcataatagatcatctcagaagagagccattccaaaagaggcggatttgattttttaaaaagccgcagcgcttttctcagttcccagccgctgatgtcaagcatgtcatgaatcggctcttctatgacatccctatgcggttcgatcgaaaagtaccattcttttttcggcacatagagaaaccgcacatcgtagtcgctgtcgcttgacggaaatccccatgcgcggctccctgattctacggcgtaaagcaccttgacgccgtgctgtgcttcaattcgttttaattcttcgatgatcctttgttccatctgtatccgtccttttccgtgatcattcctgaaaaaagcccaagtacttgggcttttcgctgtcgtcagcctttcagatgcgctttcagaaaggccagcttttccttatggaaagaaggtatgtattcatgtccgaaataccggtaaaccttcaattctttttccgtttccagatgattgtaagcggcaaacaccgtcgacggcggagtcacgcggtcaatcagcccgatagacatgagcaccggaacttttacgcggtccgccagattcatgatatcaaaataggccagtgtattcatcgcggccttctccgtctcagggctgccgttctttctgaaaaaagagttaatctcaagatacggctcatcaagagcgacatcaatggcccgctcaaaattgcttaaataaggataatcggccgcaaccgctctcggaatgtcagatagtgccgccgcggcgattgaaagtccgcctccctggctccccccgatgacggcgattctcgtctcatccacttcatcaaagccgctgatgacttccaaagcccggacggcgtctaagtacacgccgcggtaataatatgtatctttatctaaaatccctttcgtcatccagccgggaacgtgtccgtgcggtgagacgcttgtatctgtgctgctgtgctggccgcggacaagcatgccgaacgcggcatatccgtgaagcgcccaatttacgatgtcatgtatatctccgtcataactcgcgttgtagccgtgatatttcacgatggccggatgcggtccttgccggtcgggaacggcgtaccatccctcaatttccgccttgccgaagcttcggtatgtcagccggaatactttcacgccgtcagccgggtagctttcagccgtcaattcaggctttgcctcttcctttgcaagctcatgtaatgatgatgcccaaaaatccgaaaagtcatgaggagcggttttatttggtttataggtttgcagttggtcgagcggcaagtcgtataattgcatatccgattattctcctttgttttataagatttaattttctgactctatcttaacacgattttacactcattttctaaacattttaataaacgtttgtttaaaagaaaacaaaaaagccgtacgctcacagcgtcacggctctttttacatcggctgatacagatcccagccgatttttaacgtttctacgatataatcggcgatttcttctggttccagattatccgtcgccacttttgaattatgtttatcatagatgctttggcgctcgttaaagagctgctgcatttcatccatggaacggttatgcagaacgggacggctttcaatcagcaggtcagcccgctgcttccaattctcccatgataaatcaagatggagcacgagacagttttcgaggcagcactgtctgattgcctcttgtttaaacgaaccgcccccaagcgacacgatcttgaatttcgtattgcggcagatatctaatatatagtccttttcagtttgacggaaaaaggcttcaccttttttctcaaacatttcagggatggacatattgaaatctttctcaatctgcaaatcaatatcaatgaagtctctgtataatttcttagcgaccagctggccgattgttgtctttccgacacccatgaatccgatcagtacgatgtttctttctcttacgggaatggcacgttttgcgttcatcttcggcgaaatcctcctaagaaatgaaaaagttatgtttattatatgataacccaatattgaaatatagagataatgcaataaaagaaaacccatcctttataagaagagatgagtttttctttctatcggagcgtaatgcgttccacctttccgacaatgaaaatataagaaaatgccccgataaatgcgacagcgccgacaaacagaatcgctccgttatatgaaccggtcgcagaaacgataaacccgatgataagcggggtgataatgccggccatattggcgaaaaagttaaacacgcctcctgccaatccgattgtttcgcttggcgccacctcactcagcatcgtccaggatatattggacatgccctgcgcaaaagaagcaatggataagatcgtcaaaaccgcaggagcagaatccgtaacattcgcgagcacgatggagcctgtcagcagaagaccgaggatgacgggggttttccgggcaacgttcaccgacacgccccgtttcatcattccgtcagaccaatatccgccgaacaatacgccgaaaaaggcggcgatatacgggattgatgcggcgaagccgacttttaagaatgccatgtgctttgcctccgccagataagtcggaaaccatgtcaaaaagaagaacagcgtggaggctacggcgaattggccgatatacaagccgacaagcttgcggtatttaagaagctggacgaaatcccgccacgtgatcctgccggctgattcagacacctctgtcagtccgccgccttctctaatataatcaagctcttcccggttcactttccggtaccgattcggctcgtgatacattttgaaccagaaaacggagaaaacaagcccgagcacccctgaggaaataaagacggcgcgccagtcaaatgccgttaacacccagaataaaaccggtgtggcgaacgccagtcccacatattcccccgccgtataaacacccgtggcaaaggcgcgttcccgccttggaaaccatgtcgtgacaatccgattgtttgccggaaacgcaggcgattcagccagcccgataatcaggcggcagccgaataaaaatccgaaactggctgcaaaagcctgcactccggtgaaaacagaccagatcattaaagaaacgccgtacgtccgttttgacccgaatttgtccaaaatgagcccgccgggaatctgcatacccgtataggtccagctgaatgcggaaaagacgacgcccaaaagcgcggggcttatgttcagcgatgtctgaatggacggggcggcgatggatacactggcacggtctatataattaatcgcagtgataaaaaacaaaagaaacagtatcacataacgagcgcgagtcggtttattgcggacgggactgaagtccgtcagctccgtttcatttttcaatggcttctccccccttactcgaatgaaattaattgtacaacacttcggtcaattatttaatactttgacgcaaaaaagcgctaaacaatttgtgcgccgcactgacactccgcttataaaagtgtctgcccttttcacctgtttatccgtatctcacccggggaaaagtacacatatgatagacagttacgggaggattaccgatgaaactgagtttttgcacgacaggatttaaaaaaaagcatattttcgacatcatttctttcgcgaaggagcactcctttgacggaatcgaactgtggtacggacacgctaaacaatatatagaggaaatcggcccgctcgacaggcttgatcagcagcttcaggaggaaggcctcggggtgcctgccgtcagtttgtacactgacttcgccgctcaggatgaaaggcaggcgttaaaggatgttcaaggggcattaagcgcggcacgacagctgcacagccccttgatcagagtctttgccggcaatcttccttcgcatcggacgtcaccggaaaagtggcaacgtgcggttgatcaatttcagcaggcggcacggctcgcagatgactatgaagtcgatatcgggcttgagattcattacgatacgtacgcggatacaccggaggcggcactggcatttttggaggatgtcggacatccgcgggtccgcaccatttttgacggctccaacctacacgtcaatcacgttgaccaaatgtccgctttagaaaagctgtatcataccgtcagccatattcatctgaaaaactatcactggaattttgacaactggtatctcagcaagccaactccgattttccaaggagatctcgatcaaaaagcatttttaaaagagctgatgaacagacaatatgacggttttgtttctcttgagtattttggagaacatgcctttacgcatataaaggaatcgctccgggaatatacgtctgttttttcccgctgactcttcgatcgaagggtcttttttttgtatcatatagaaaaagggggatatcatgatgatcatttggataaatggggctttcggttccggaaaaacacaaacagcgtttgaactgcacagaagactgaaaccgtcttacgtatatgatcctgaaaagatggggtttgcgatgcgttcgatgataccgccggatatcgctgaagatgactttcaaagctaccctctgtggcgggaattcaattacagcatgctttcctatttgtcagatacatatcagggcatcatcattgtgcccatgaccattacgaacgatcaatacttccatgacattatcagcaggctgagacaggatggccggaccattcaccactttaccctgctggcttcaaaggaaacattgctgaaacgcctgcgcaccagagcggaaggaaaaaactcctgggccgcaaaacaaatcgaccgctgtatcaacagcctgtctgatagcctcttcgcagaacatctccatacagaccaaatgtctattcagcaggccgcagaaacgatcgctgcccaagcaaatctgcctcttgagcctgattcgagaggcagccttcgaagatttaccgacaaattaatggtgaagctgaatcatatccgtatcaaataaaaaagcgttttgaaaacatgtccctgacccatgcaaatggatcaataaataaaaagtccctccgaagggatgtttttttcaatttaagaaaaaaattttagaaataaaggaggaattatatggataatcgtctaattattaacactgtaatacatttcatttgaaaagggagtgttcgaaatgaaattcaaaaaagtgttaaccggttctgcgctgtctcttgccttactgatgtctgccgctcctgcctttgccgcatcaccaacagcatccccatccgtggaaaatagcccaatctcaacgaaagcagatgccggcattaatgccatcaagcccgttccaagccctaacggtattttcgctgcttctttcgaactgaatggtacaacatggatttttaaatacaaatactatgacagcagcaaagggtattgggtagggatttatgaaagtgtagataaataaaaatgaaataaacaaaaaacctccctttcaaaagggaggtttttttcattctatttccaccaatcatcaaacatcgatgccggcacctggcgcttgtgctccgtactgaggtagcgtttttccagcgcttcaatcacttcggaagaaacatccttgccttctaaataatcatcaatgtcattgtatgtgatgccgagctcggtctcatccgtctgctgcggtttttcatcgagcagatcggccgtcggtaatttcaaatacaggcgttccggcgcgccgagttcttctaataaacgtctgccctggcgtttcgttaatccggtcagcggcagcagatcagctccgccgtcaccgtatttcgtgaagaaaccggtcaccgcctcggccgcatggtcggttccgatgacaagcagcccctcttgtccgccgatggcatattgagcgatcattctcattctggcttttacatttcctttgttaaagtcagacagctgatcgcccgtgtcttttttatactgatcagcgaacgcgctgacagcggacttaatatcaaatgtccatgatttatcaggtttaatgaatttgagcgccaattgggcgtcatcctcatcttgctgtgtgccgtgcggaaggcggacggcgataaattcagcgtttccgccttcttctctgatgctttcagccgccaattgggcgaggcgtcccgcaagcgtggaatcctgcccccgctgatgccgagaacaaagcctttggcacctgtttttttcaaatattgtttcagaaagttcactctgtcctcaatttcttgtttcggatcaattgagggttttacatgaagatcattcataatttgtttctggatgctcatcccaatcactcctcctgcattgtttctttatgattcatttcccgttcatactgaaaatgaatcatgccactatgtacgactctttgttaaatatagcacaggtgcagtttttaagtgaaccaaatacaccgggatcagctgatttccacccgcagcgccgtgatgctgtccccgttgcatttccctttttcgatcggacaggatgaaaacgcgacgacgagatccatttccgcacggagccgtacataatcacccgcgtcagaaagaggggtttcgactgataagttccccttctcatcgagcaccgtgttcataaagatggcaaatgggtaatgcatatgcggccgcggcaccccgaacggttcaagcgccccgctcatattgtcatagcacgtatcctggagctcgtccttatgctttccgtataaaagcctgttcatatccggacggcaggcgggaagcagcaagtcgtgcttgccgactgtatcctcaatcagcgtcagcatcggcttgtataaatttgaataaatatgatcacctgtttttacatgaatggactggttggcatcgatcgtcgcgccctgatcaagatgttcataaaagtccttggcatgatacgccgtaaaatcagccacctgctgcccttccacatcgactacttttataatctgccctttgtgaaccttcaggccgagcccttttttcggcggtacgataaattgctgtgtcatcagactgctcctttttttcttctattatgaaccccggccgtttgtttcatgtaaagcaatttattggatgtatattccccttctgacggccgcaatctaagctttgataaaggggttgaacttcatgagtaaatcacaggaccagcctaaagggaatctcgcttggtggcagctctccttaatcggtgtcggctgcacaatcgggacgggcttttttctcgggtccagcatcgctattgtcaaaagcggatattccgcgctgatctcatttcttattgccgggcttggcacctattttgtctttgagcagctcgcgaagctctcggccaaacagcccgaaaaggggtctttttgcgcttatgcgagaaaggctttcggcacttgggccggtttcagcaacggatgggtgtactggtcgtccgagatgctgatcacgggaagccagctgacagcgatctcgctgtttacgaagcattggtttccgaatgtgccgctgtggattttcgcctccatctatgcggtgctcggtcttttgattatatttacggggctgtccgtttttcaaaaaacggaaaatgtgctcgctgttgtcaagacggcggcgattgttatgtttatcgtcatcgccatattggcgctgtgcggtatattttctcataaaccggatgtgcaggtgccgaacgaatcaaaggatttgttcccgcacggagcgatggggttatggacgggattgatttatgcgttttacgccttcggaggaattgaagtcttggggctgatgaccgtgcatttgaaaaagccggaggaagcctcaaaatcaggccggctgatgcttgccgttcttgcggtgatttacgtcatttctctcggcctggcgctgctgttagtgccgctgggcaaattcaccgaacaggacagcccgtttattacatcgctgaagggttttcatttagatatcattcttgatatttttaacgggatttttattattgcgggattttccacgctcgtcgcctcgctgtttgcggtgacgacattgctttgtacaatggctgatgacggagatgcgccgaaatgcttcagattaaaggaaaacaaaaaaatctgctggcccgcgctcggattgacgtttgccggactcatcgtctccatcatcctgtcattggtgctgccgaaaaacatatatgaacacatgacaaccgcggcgggcctcatgcttctttatacgtggctgttcattttgttctcgggcaagaaactgcttgaaacgacaaagatgggaaccgtacagattgttatcgcccttgtgctgattgtcgcggccgtctccgggacgctgtttgagaaatcgagccggcccggttttctggtcagcctttgttttctcgccgtcattgcgatcgtgacatggatcgtacaaaaaaagcagggacacagccctgccggatcatagcttatttcgtcggtttaaacagtctcttcaaataagaaaagggacactttgacacttgggtctcatcatcacggaggaaatattgcttccattctaaattgtcttttcctccgtaccaccccaatcggggatgaagaggggcttcatcatacgcctctaagcgttttctgatcagccggctcatgtttcgtccgaacgcggttgaatcatttaatccttcaaaaacccatctcggctgaaacgccagcataaaaaacgggaagcttctgctttgtctcgcttcatgcgcaggcgtcgcgcacagaataaaatacggctcgccgtcaaagcagaactcccatttataatgttcagggtcttccggtatgtcttccggccagtctttcgggtcgcagccgctcagccggtttaaaaaagaccagaacagctcttcatacgcctcaacggaataatgctcagctaaatcctcaggcgtatcaaaaatcacaagcagcgacgcgtattttccggtattccttgagatctttccgtactcggacagcagcatccccacttcctccggggttccctcttcgcggggatcacccgcaaaggatatccggagctgatctgtcaaaaatccctgacgtccgggaatgcacggaaacgtatccgctttatcgcctactttttctgatagaagctcaaaagcgattctctgccaatttggcagatccaataacttttcctcaaggcaactttttgtgtacagcccgcttgccatcggcccacctccagtatcgtcaggatacgttatgatggagacaggcgataggtgacagtccttctatttatgagatgagcatttgaatcccctgccagccgaaataaaatccgaaaacgatcaaagacacacccgccgctcccgtcagccagcgaagcgctgtttcatgaagaagatttctgaaagtgctcgcagcgaccgccatgcagaaatcccagatcaaaatgccgagaagaatgccggagctgtaaatcaaaagctgatttgcatcgaaggattcagcggttttggcgagaatgctcccgtatatgccgagccagaataaaatgctcagcggattggaaagagaaataaaaaaccccgcgccgaaagttttgtaaaaagccggttttccttttccgcttctgacattcatggcttcccttatattttttaacgtttcgactcccgtgtaggtcagcacgaaaaaaccgaagagccacaaaaacgtttttacaaaaggagcggtcaaaaattgagacagcccgaaatagatcaaaatcatatacagcccgtccgcggccatggcgccgagaccgaaaatccatgcatgccaaaagccgtttttgatgcctttgtcaatttgcgccgcattgaccgggccgacaggtgctgacaatgacagcccgagaacgatgtagcttaaaaagatgttcattggcttccccctcattcatgcaacttgtacaagttattcatgaatgggccgtgctatgatacattattttaatttctcaagctcgtcttccatcatgtccgtcgcttttcctaaaaaatcgaatatcagccgcagttcttcttctttatattgccggcaaaggctgatcgtggactgggataaggagctgaataattgcttcacattcgcttttccggctgtcagcggcacgatgatcacccgccgtttgtcttcggggtcttttttcctcatgacatatcccgctttttcgagccggtcaatgagcgccgttaccgaacctgtgctgaggccggtttttttcccgagctcgcctgcggtcatcgggcctgcttcatttaagatatcagctgatttcaaatcggtcggaaacagaccgagagattgagcggccgcctgatgaaacaggatcgtccttgtggccatcttccggaataactgtatggcggtttcctccgtctcgcttctggtatttcttgttgacaactgacaggcctccctataaaatcaatttatcttgacgatcaagataattttcggcaaatctaatatgatcatagcaaatttaatgatcaaaagtaagtatgggaggaaaaagcatggaacaaacagccgcgaaggacgcctcgacgaagtttgtcgtcatcggtcttttgctgggcattttaatgtcggctatggataatacaatcgttgccactgcgatgggaaatatcgtggcggacctcggaagtttcgataagttcgcgtgggtgacggcatcatacatggtagccgttatggccggtatgccgatttacggaaaactgtccgatatgtacggacgcaagcgtttctttttattcggtcttattcttttcttaatcggatctgcattatgcggaatcgctcaaacaatggatcagctcattatttaccgcgtcattcagggaatcggcggaggtgcgctgatgccgatcgccttcacgatcatttttgatttatttccgccggaaaaacgcggaaaaatgtcgggcatgttcggtgccgttttcggcctttccagcgttctcgggccgcttttaggcgcgctcattaccgactccatcagctggcactgggtgttttatatcaacgtgccgatcggtattttatcattgtttttcattcttcgttattataaagaatcccttgaacacaagaagcagaaaatcgactgggccggcgcgattacgctggtggtttccattgtcggtctgatgttcgctcttgagctcggcggaaaaacgtatgattggaactccgttcagatcatcggtctgttcgctgtgttcgccgtgttctttatcgccttttttatcgtggaaagaaaagcggaagaaccgattatctcattttggatgtttaaaaaccgtttatttgccacggcacagattctggcgttcctttacggagccacatttgtgattttagcggtatttatcccgattttcgttcaggctgtgtacggcagcaccgcgacgagcgcgggctttattttgacaccgatgatgatcggttctgttatcggaagtatgatcggcggaattttccagacgaaagtgcggttccgtaatttgatgctgatttccgtggtcgctttctttatcggaatgctgctgctttccaatatgactccggatacggcgcgtacgatgctgacggtattcatgctgatctcaggattcggcgtcggcttcaacttctcactgctgccggctgcgtccatgaacgatctggagccgcgttaccgcggaagcgccaactcaacaaactcgtttttgagatcattcggtatgacgctcggtgtgacgattttcgggaccatccagacgaatgtgtttaccaacaagctcacagattcattcagcggcatgaaaggagcgggcggcgcgatgcagaacatcggaaatccgcaggagattttccaggccggcacgcgcgcccatattccgccgcacattctggatcgcattattgacgccatgtcgcaaagcatcacatatgtattcacgcttgcgctggcgccgatcgtcattgcggccgttaccattttgtttatgggaaaagcgagagtaaaaacctctcaggaaatggcgaaaaaagcgaattaaaaaaagcagtacatggcgtttgtcatgtactgcttttttgtttactccgcgaaatgcggagcgagaatgtctttcagcacgtttgcgctatggttgaattgacgctgttctgtttcattcagctcaagttccgtcacaccggcgatgccgttccgattgacgacagccggaatgccgataaagacgtcgtttacaccgtattgcccgtccagatatgtgctgacggttaaaatactgttttcattacgcaaaatcgcttttgtgatgcgggcgaggctcatcgccactccgtaatatgtcgcgccttttttctcgataatatggtaggcggcgtttttcacatcgtccacgatctgatccagctcgtcctgtttgtaagctgcatttttctccagcaattgctgcaccggcactccgccgatattggcgtgactccatacaggaagctcggtatcgccgtgctcgccgataatgtgggcgtgtacgttttgcggagcggcgccgaaatattcactcagcatataacggaatcgcgcagaatccagtgtcgtgccgctgccgatgacgcgttctttcggcagaccgctgaatgtccatgtcgcataagtgagaatgtcgaccgggtttgtggcaacgaggaagatgccgtcaaatccgcttgccattacttcaccgacaatgcttttaaaaatggcgagatttttttcgaccagctcaagtctcgtttcgcccggtttttgattggctccggcacagatgcatacgatatcggcatccttgcaatcttcatatgttccgtaagacgttttcaccggatgaggtgcaaatgcctttccgtgatttaaatccatgacatcgcccatggctttttctctatttacatcaatgatcacaagctcatctgtgatcccttggttaattaacgcaaatgcataactgcttccaacaaaacctgctccgattaatgctactttgttcactcgttcgttcatcatgtatgctcatcctccagtgtttcgtggtgtctgtttttaacttgtgaagtatttcacatttatattgtgcaacacttcacaaacttttgcaagagaaaagtttgatttttggacaaaaaatatcgatgatggtttccagattgttgacaacatcctaaaacggaaccgttttaggatgttgtatcttttcagcgtgattgaagacgtgctgtccttttcccagaagcgagggtttgccggcacgctgatgtgatgatagccctatccattaatgcggaagataaccgtttaaaccggagttgttatacaaaccattctgcacataatcaaatccgggctggttctgcccgggcacttgggcgctgccattgttaaaaatcactttggcattggccgtatccgcattcgcaggcagcgtcagcgtgtaaattccatttgcattcttagtcattgctttccccggccacgatccggttaattctatggccctgcctccatcatgtttgtaaatataagcatttacctggccccaatgatccggattttgatagccaatgatgttggtttgggcctggtcttttttgacaaacgtgtattcttgagttctctctgcaccctcgccgttcgttccggttaacctgatgttgtatgtcgtgccgattggatctcctttcccgatcgttaatcggtctccatccttaaatgctgtctgctgcccattattgatttggtaaacggcttttgctgttttcgcatttgcacgcagggtgaccgtcagctgatcattgaaagaatggactgcccccgtttggtaattctcaagaaagacatgaggcgcatttccaatatcatcagaataaagaacagccgcggatctggcattgatcgtacctgtcagtttgccgttcgctacttgaaatgaaccggcgccggccctattatcatacctgccgtcaggcaatttcgttgaagtattgacggtgacagaagacgatcccgcattagccagcacaacgccttttgagccgcgctgattcataaatatttgattgttcccattcggattcgagagttcctcaggctgcccggccattacattgtgaaattgattgaccgcagtgatcgcctgatctttaaataaggcgctcccgcgatctcctatttgactttttccgggaaatcgcaccccatttcctccgccctcaggtctggaaaagaaaagaggcgtgcttcctgagcgggaaccaatcactgcccagcctaaacggatatcgtcatcactcatccatgtggactcttcctcatcattggcatacgtatcatgtgattccacccatgtgaccaacttgtccgcagacacgtcagatgcataatgggagatattcgacacactcagattacggttctttaaagcggatctgatggaatgcccatagttagaagccgtcacattcatataattcgcataagcagtatctctggacgcgctgtcttgcaggatttctccgtattggaactccgccgatgtatttgtgatattcggccaaaatcggctgccgtaattcccatcatccggaagctctatatgcttggcggcatcatagcggaacccgtccgctccgtcattcaatgctctttccaagaaacgtttcagataggtttgcacctcagtattctgtgtattccaatcatacagcccaagcaatgaattttgagtgacgtcccacctgtccgaccaatttttaatttgtgtgtttccatgggtccagtttggaatacgcttaatctcgtcagaaatcgcggcgtaatcgctggtggtatgattgataaccgcatcaacaatgacttttacgccatatttttccgcggctgcacacatgtccttaaattcttgttcagtgcctaagtaacggttgccgatttggtacgatgtcggctgatacagccagtaccagttcctcatgcttttatctccttggttcccttcctttacttggttaatcggagacgtctgaatggctgcatagcccgcatcacgaatctctttcatattttgtgttaacgtattgaacgaccaattccaggcatgaaggatggtcccgtttttgaccgatgacgcggccacctcattcgatttgtttgcagtttcagcgtttgcagccgccgggcctgacaaaaccaaatgaaacagcaataaaaatccggcgaataacggcagtaaagaggttttgaatcgtttttcaaacatttttgacactccttatttcatttttgaagactgactgcggagtcaaaaattcctcttactctttcttcagctcctttcaactgttgtgaagactggagaattctgttaacgcttacatttcaacttatcacactctctctatcaaagcaacgcggcagagtgaattcaaatctatattcctatcaattaaaaagacttcccgctttcaaacaaaaaaagaaaccacctgtcaagatgatttcttttttatttcttttatcgctcttctgtaagacagcttcacaatgacataccgaagcagaaacagaatgcctccgcagacgataaaaagaaagatcattttcagccaagcaaagaatgtatggggaaaccccctgtcgtacatcgtaagcgccgccaccgcaaaagtgactgctattgaatctatccgctgctgcttcacccgctttttcagttcttctttggtgtctattctcggcatgagcattcccgacgctcccgccctgatgcaataataaacaattataatgaagaaaaccgccaagctcccggcccattccctaaacggacagttcagaacaagtccgcgtacgatgatgtcaagcaaagacagtgtgcccacaagcattccgacttctgaccaaatcattcgttctttctctttcacactctcactctttccattcacgtttgaaagtctgttccgacgctgattcatgacttcctcccgtactattaagaatggcttacaactcccattatatcttgccgattcataatgataaaccgaaatatcattgacaaaaatgttaataagggccccaattgatcaggacgcctatgcagataaacacaaggccgatgacaaaccaaatcagcgccagcggaatcatgaagcgaagccactttacgtacggaatgccgctggcagccagtacggccatcagaacgccggaagtcggattgacacagtttacgacgccttccccaagcatgaccgcttcaaccgcgacctgtctcgtgatgcccatcagatcggcaagcggcgccaaaatcggaataaatacgaccgcctcccctgagcccgatgatatcagaaaatgaagcagggcgctggaaatatacattccgattgcgcctgccatcgggctgaaaccgtgcagcagtgacgcaagtccattgactaccgtatcaagcagctttccgtgttccagaataacggaaatgcttctcgccattccgacgatcagcgcgccgtaaacgagcccctgacagcctgtaataaacgtttttgcgatatcatttgccgccattcccgcaatcaggcctgacacgattgagataaaaatgaacacggcggccatctctgaatcagaccagtcaagagtaagcgcgccgtataaaaagccggcaagcgacaaagccgcgacagccagaatcaatttatggcggacggtaaacgggactggcttgtcctccggatctgaagcctgcgggattgaacctgctgccggaaaccaatcgttccccagcagactggcgtcctttgcttttctgagccttctcgtataccgataaatatataaaatagatgatagcagaaaacaaatgtagacggcaatccgcaggccgatgccggaaaacagcggcagctccgcgatgctttgtgataacccgagcggtgaaggtgataaaatcgtcgcgttaaacccggcataacagccgatataaatgacggccgctccggccacggcatcccatttcagcgaacgggcgacgatcaggccgatcggaataaaaccgatcacggaattaacgacgatgccggttgtgccgaggatcgaaaatagagatccgacaattgcaataaacagcagctgtttggtgcggaacgtactgatgacattactgatcaatccattgatggcgcccgttttctccaaaatcgcaatggtgccgcccgtaaacaggattaaaaaaataatcggcgcggaacttgtcatcccttcctgaatcgcggtaaaaaaagcgatcgggctgacaggagactggtctaaagaatgataacttcccgggacggcggacgtcacactgccctttgtcaccctgtcaaattcccccgcaggaacgatgtatgatgctatcgcgcatagtaaagcgacaatgaacagcagcacataagcatcaggcatcacaaacaatttcttctttttcaatacaggttcggccttcggcacagccataacatcaccatcccgctttgaatttataaactattcagaaaatacagatatgtgctatattatatacagaccgattgcctgttttcaatatcaaaaataaaaaacagacagcttttgaaggaggacttacggcatgaacagactcacagagcatgaaaagcaagtcattatggacatttttgaccacctgcacgccaatcccgaagtaagctggaaagaatatcaaacaactgaatatctgactgaaaaactgaaagaggccggctgccgaatccgtacgtttgatgattgcaccggtgttgtcggcgaaatcggagaaggctcgcccgttgtggctgtccgggcggatattgacgcgctgtggcaggaagtggacggtgtctttcaggcgaaccattcatgcggacatgattcacatatgacgatggcgctcggcacgatgatgcttttaaagagtcagccgaagcttccgaagggcaccatccgctttatttttcagccggctgaagaaaaaggcggcggagcgctgaaaatgattgaaaaaggcgtactggatgatgttgacttcttatacggcgtgcacgtgcgccccgtacaggaaacggcaaacggccgatgcgcaccgtccattctgcatggctcaagccggcatatagaaggcctgattatcggagaagaagcccacggcgcgagaccgcatctcgggcttaacagtatcgaaatcgccgctcttctcgtccaaaaactcagcttcattcatcttgatcccggcatcccgcattccgtgaagatgacaaagcttcaggcaggcggagaaagttccaatatcattccgggaaaagcatcgttcagccttgatctccgcgcacaaaccaatgccgccatggagaaattaaccgccgaaaccgaaagagcctgtgaggcggcggctgccgcattcggcgcaaaaatcgaactgcaaaaagaacacagcctcccggcagccgagcgaaacaaggaggcggaagccatcatgacatctgcgatcagcagcattctcggagaagaacatgtggatgaacctcttgtgacaaccggaggagaggattttcacttttacgggttaaaggtgccgaacttgaaaacgacgatgctcggcctaggatgcggtctggagcctggacttcaccatccccaaatgacatttgaccgaagcgccatctttactggcgctgagatattaacggccgccgtcctcaaatcgtttgaagcataaaaaaaagcagcccgttacagggctgcttttcttcattacttcttcagatcttcaattgaattgacgtttttcatgtactgaggaacgaccagacccatcttgacgcctgtcagactcgttcctacatcttcatatttgcctttatatttagacgcatatgccttatgggtattcggaagccaagcagacaatgacgcatccgcgctgcctgtcgcaatcgcagtccacatcggtcctgcctccacttgcgtcagcttcacgtcatagccgaggtcttgaaatacttttccgattacattcgtacttgcgatttcactgtcccatgccacataagccaggttgattttatcccctttgactttatgggcgccttttgtccattgagccacttggtctttatgttttttcacatattcagctgcggctttggccggcttttcgccttcctcaacggcaatcatgacttctcccatatcgtcctgcgtccatttgaactggctgagaactttggccgcgttaggctgttccttactgaagccggttcttgtaatcgtatgaatctgctcggcagttccgtacgtttttttcggatcatcaaggaacttcagcttgtatctggagaacatccagtgcggcgtccagcccgttacgatgatcggctttttccggtcatatgatttcttcaatgtcgccgtcatggcggcacttgacgccgtgatgacattccagtctttcaatccgtaatccttcacggcctcatccgtcagggccatgatccccgatcccggatcgataccgataatggttttgttcacctggtccgcagccgttgccttatcatcagtctgcgaaccgcaggcagccaaagaaagagccagcgcagcggtaacgccgacaccgatgattttcttaagcatcaggcattccccctgctcttcttcttcactttaatgttttgcgtgatacggtcgagtgtaatcgctacgataacgatcgcgatacccgcttccactccgacaccggttttcaactgtgtcacggcgctgtatacttcagaaccgaggcccggcgcaccgaccatggccgcgataacgaccattgacaaagcaagcatgatgctttggttaataccggcaagaattgtttttgtggcaagcggaagctgcaccttgaacagacgctgagacgtcgttgaaccgaatgcttccgtcgcttcaatcagatcagccggaacctgtttaataccgagaactgtcatgcggatcgtcggaggcatcgcgaaaataacagatgccacaacgcctggcacaaccccgatattaaagaagaaaattgcaggcagcaggtatacgaaagccggcatggtctgcattaaatccagaatcggtgtgacaatgcggcggactgtttctttctgagacgcccatatgccgatcggaaccccgataataatggaaatcaaaacagatgtgacgacaagcgccaacgtttgcagcatcggcgaccaataacccaaataatcaataacaaggaatccgattaacgtaaagagtgcaattcctctcgtactgatccaccaagcgagagctgcaaaaataacagtcaataaaatagacgggatgaaacccaaaccgctcacaatcgcgtttacgaaagcggccaaaccgtttgagattccgtcaaagaaacctccgaacgtcatggtaagccagtcaacaaaccggtcaacgatatctgctaacggaattctaggcaatctgtccatttacttcaccccctgaacagaagaatcctgagcttgttcagcagaatcttcaacatttatataatcgttatttcctgaaagcgcgccgattaatgcgccttttacgacaatgcctttcatgcggtccttatcgtccgtgacggcgatcggaatattcgcatcagacacgacatcgaaaatttccgtcaagtatgtgctttcatgcacagtcgtaaattcagtatttaaaatatcctgaagcgataagtcggattccaccgcttttttcgcatccgccgcgtgaatgacgccgagaagctgtttctgtttatcaacggcgtaaatagaagaaataccgagattcttcatgagctgcagcgctacacgaggccctttgtcaatccgcacggtttcagcgcgcttcatgatgtggcccgctgtcagaactttggataagtcaacgtcctcaacgaatttctcaacgtattcattggacgggctcatcagaatttcttcaggcgtcccgatctgaacgatgttaccgtctttcatcagcacgattctgtcgccgatgcgcaatgcttcatcaagatcatgcgtgatgaagatgatcgtcttgccgacagagtcatgaaggtctaaaagctcatcctgcatgtctttgcggatcagcggatcaagcgcactgaaagcttcatccatcagaagaatgtcaggatcattcgtcaatgcgcgggcaagtccgacacgctgctgcattcctccgctgagctgatctgggaattggtgttcaaagccttcaagaccgacaagtttaagcgaatcaagcgctttttgctcacgctcttttttgtcgacgccttggagttccaacccgtattccgtattttcaagaatcgttctgtgcggaaacagcgcaaatttttgaaagaccatgctgatttttttccggcgcacttcccggagctggtcttttgacatatttgttatcatgtcaccatcaatataaatattcccggcagtcggttcaataagccggtttaacagccgaactaaagttgatttaccgctccccgatagacccatgatgacaaatatctccccatcatatacatcaaagtttgcttgattgacaccaacggttgatccggtcgctttcaggatctcttttttgttttttccgctggacagcatctgaatggctttttttgtctgttttccgaaaaccttagatacattttcgacttttatcttaattggtttctcatccaaattcatattttccctccataataagcaatctttaataccgtaacacgtttgtaataagtcaaacaaacatcataatcccgtttattttgtatcattactttaaaaacatccctgtgtcttattttcctctggtatgcttctaaatactctctaatcctccttattgaggataaattataaaggaaatcgggcttttatcaggcttgagaacgtttccatcgaatgtgctgcaaactgatttcctatcctttttttacaaatacaagaatttttttgcgacattgtcccggaaaaagaagttttcgcctcctgaaaataagggattttaaggaaaaatataggtctgccaacagacagctcactaaaaaaagcaccccaaaagggtgctcattgcgcaagctctgtctgtttcgtttcttttccgagaataataatggtgatgacggcaatcaggatggccgcacaaaagacagcgaaaatagctgtaaacgaaacgttccgtgctgcaagcgatccgacgagaagcggaccgaaaatgccgccgattctgccgacggccgcggttgttccggaaccggtcgcgcggatcgccgcagggtactgctccggtgtataggcgtaaagcacgccccatgcgccgagattgaaaaaggacagcagcatgccggccgtgagcagcatggccaatgaatccgcggcaccgaagaaataagcgctgcccgccgttccgagcaaatagatgactaagatggtcttccgccccgctttttcgatcagccacgccgctgagaaatatccgggaagctgggcaagcgtcatcagaaggacgtattcgaagctctcaatcatgctgtagcctttcatcagcatcacgctcggcagccataaaaacatgccgtaataagaaaagacgacgcagaaccaaacgacagacagcagcaccgtcggccggatatacggtttcgtccagacacttcccgcctgcccgcgtatgctttttttctgcgtcaatgcctgatgcgccggtgattccggaaggcttttccgcaagtacagcgcataaaacgcggccagcgccgttaagagcagtgcggcctgccagccgaatgacggtatgacaaagtaggaaatcaccgccgcaagaagccagcccgctgcccaaaagctctcaagcagcacgatgatccgtccccgcttttcgggagcggacgcttctgacacgagcgtcgaggcgacaggcagttccccgccaagccccattccgatcagaaaacgcaatatgagaaaaaccgtcaatcccgttgcaaaagcggatatgccgcttccgacagaaaagaataacagcgtgatcataaacacttttttccggccgatcctgtcggccagcattccgaataaaaaggcgcccgctgccataccgatggaattgacgcttccgatccatttcatttgatcgggtgttaaattccaatcagtgtgaagcgcggcgataataaacgataaaattccgacatccatcgcatcaaacagccagcccattccggcaatcgccagaagttttcgcggagtgacggcaggttgtttgttcataagcagcacctcaaatcgaaaatgattaccgtataagtttacacctgtctttacacattgtcattatcttttttcgcaaaaaaacccgcttgccgtaagcaagcggggtgcagattaattctttaagactgcgtttttaatattatcctgaagctgttgaatccgtttcgctccgtcttctctgatacgtctgttctcttcctcgatctgtttcgtttcctgcataccgctgacaatcgtattccaagacgtttcaatcgtctcaatgtcaatgctcggacggcctgccatacgggcaatctccacgctttggtttgaaatattttcagcgttgcgcttcagcatttcattcgtgcggcggtccagctcgctcattgaatcagccacaagcttttgccgtttgactgtgacagcctgaatgatgccgtttttgaaaatcggaatcgtaatgacgaaagcggaattgatttttccgatgagcttcgtatttccgcgctgaaggaggcggatctgcggcgctgtctgcagcgccaccatccgcgccatatctaaatcatagacacgttcctcaagcgcctgaagcccgtcacgcagcgtatcaagctgcatttgcgcaagctggtttccgccggccgctttttcttcataagaaggaatgagcgcctgcatttcctcaagcttcatctgcccggcgacaacatatttttcaagctccatgtagtagttaatgttgttttcatacatctcttcaagcgtatggttcgtctttgccatttcatctttgtattttgaaatttcgacgtggattttttcaatttctccgcccagggtgcggtacttttgaaaaatcttttcaatcatgctgttgccgcgtttgaacattttagcgagaaatccttttggttcatcgaaatcatttttgtcgaaacggtccatgatttttccgagctgcgtcagcattgtgcctgaatccgtgacacttgttgttttcatcatatttaagatgcggtcggagaacttcgagatttcaactgccggttcttttccgtactcaagcagctccatttggtttttcacgtcaatctgctgcgaaatgcgctgcacctcagggtcttggcgcagctgcgccctgatgtcatctgctttttgttcagaaatctcttcatttttatcaagaacaagcggattttgattttctgtcatatttatttactctccctgcttttgcgtaatggttctaaacagctttcttacgagtgacggctccttatattcctgccgaaacaccatgtcctccagccaatggacatcaaattggctttcttcaatataatgctcaatgtcctgatggcccggcggattatacaagatgatatcgacgccgaatttatttaaaaacaaaagagcggcggcatcagaacgtgtgagttcgccattttgttccgtatgatataaaacgagtttcggaacggtttgggcgtaatcaaacgtctgaatcaattgcagcagcgaagcgggcagattcgtcgcctggcggaacaaatagattgcggcatcccttgactgctccccgggcaaagccttcagccctgggtttctgcacatgtcagaaatcacattggcgatggcgctctgcacacctgaaggcagatgcttgtactgccagatgttgcttcttttcagcctgtccgcgtcaatctctcctttttcatttaaaacctgactgtagtgatactggtagttggctttcagctcttccgtaaacggaaaactgcggatcatgtgtgtctcctgatagtccgcggcggtatggagtctgttccaatattctttcgtatctttggaaacccccatcactttcgcaaaaaggttcggaacggccacccgctccctgtccgctttaaattgcggccggataaacgcccgctccttcgcaatgagaaataactcatcatacgtcgtttttaaggtcacggactgcggggtgtgctccctgaactgccaaggcttatacatcatggattcctcatggttcagcacatgctcaatttctttcgttgaccggtaggccgtcgtggacgttctgtccggcttttctttcggaaaaggctcaagaccgcctgttgcggggagctttatcacaaagctgagctcctcatccggatcaatcaagctgaacggatcttccgcagccggatgaaacaataggacatcacagccgatcagcatgagataatagagaaaatagagctggcttttggtcgcgtctccataccacaccaccttcggcatctcacactctatatcggcttgttcgagccatggattcaggtggttcagcgaaaactttgacacatccaagagcacacgccggaaatcgggatgattcagcccgttttcatgccggtccgcaaaggtttccaaaagcgtcataaacgcggtcctcagccggcggtgcataagcggatcagcgtgtttggcaagcagcctgcccccatcgagaaacgcgacaaacctggaaaccgaaagccctttctctttttgattgaccgaatgaatgtgctgcagcgcctgaaacgtttccggcgcgatggtcttatccagcgtctcgctcaacacatggatgttttcatgagaagacagctcgaaaagcttactgtaatactccgtctcatcataaggagtgcccaaaatccggccggcaagccgggtaaacgccagcccgttttcccgctcgtaaccgggacgttccggcagcggccgcatcagaaacgtttcccagtcatcgttttccggctcggcctttcggatcaccaattcttcctgcttcatcattttcctcctttctcttcatgataatcggtacaaaaaaggaaggaaatgaactctccctccttttttgttttattcttctttagatgcagccgtctgctcctgaacctgcttttgtttgttgaaatagtggataataaacgtgaccacaaatgcagcgatgatgattccgaagaacaccacgtgcggcatttcataatcaaaagcgctcgccgccattttcacggcgataatcccgatcagcacgaaagccgtgttttcaagctcagggattttatcaattaacacaaggaatacttttgcgactgtacgcatcatgagaatgccgagcataccgccgatcaagagcacccacactttttccgataccgcaaacgcggctaaaatgctgtcaacagagaaggccagatccattaactcaactgaaacgacagtggcccagaaaattccgaacgtacggaccatccatgaatttttcttcatgccttccgtatcgtcatcaccttctccgatccagaaatgcttaatgacgagccaagccaggtacagcgcgccaagcactttgatccaccagaacttaatgagcagcatcccgattccgataaagataaagcggaaaatatatgccccgaacaatccgtatgttaatgctttcttccgctgtttttcaggcagatgccttaccataaccgcaagcactaacgcattgtcggccgacagcagcccttccagcagaaccaaggaaccgatcagcccccatgatacagggtcagtcagcacctcaccccacattttccaatcaaaaaaggaagcgtaggtcgacataatatgatgtagaaaatccaagttttttcctcctatttagtaaaacggtaatttcctgcttacacctgcaagccgtaattccggcaaagtgatgccagaccgccggaaaacccgctgccgatggcgttaaacttccattcagccccatggcggtaaagctcacaaacgacaaccgccgtttcaatcgagaagtcttcccctaaatcgaaacgaagcagttcattctggctgttttcatcgacgacgcgcacgaacgcgttcgaaacttgtccgaaattttggccgcgcgcttccgcatcatgaatcgtgacggtgatgccgatcttttcaatatttgcgggtatttttgagaaatcgacgataatttgttcatcgtctccctctccctcgcccgtccggttgtctcccgtatggatgacgccgccgctcgggtgttccaggttattgtagaaaacaaaatcaagatcattaacacagttgtcatgggcatcgacaagaaaagccgacgcgtcaaggtcaaagtcatgccctccggagtacttgttcgtatcccagcctaagccgatcaccgcttttgtaagaccggggttcgtttttgtcagatcaacacgctgtcctttcgccaattgaatagccatgtgccgtctctcccttctgtgcttgatatggttttagccgatttgcaggccgtaatctgtcgcaatacgggccagtccgccttgatagcctgagccgatcgcggaaaatttccattcgccgttatgtctgtaaagctcccctgcgataatggctgtttcaattgagaaatcttcagccagatcgtagcggatcagctcttcatttgtctcttcattgacaatgcgaacgaacgcgttggaaacttgtccgaagttttggccgcgcgcttccgcttcatgaatcgtgatgacgaatgaaattttgtcaatagcggcaggcaccgcgctcaggttgacccttacactttcgtcatcgccctcgccctggcctgtaaggttgtcgcctgaatgtgcgacagagccgtttccgccttcaagctgattatagaaaataaaatcatcgggcgacgcgcatcttcctgcttcatttaatagaaagacgctggaatctaaatcaaaatcatgtccgccatcgtatttgtttgtatcccagccaaggccgacaacgactttagaaagacccggatttgttttagtcaaatctactttttgtccttttgccaatgaaattgccatgtgtgcactctcctttttatcgtttaggcgtatcggttaacgatatcgccgatttttgtatcgtttgtgccttctcctactgcggcgaatttccactcgccgtcctcgcggtagatttcagccgcgatcaggctcgttctgcctgaatagttatctcttaaattgtaagtcaccagttcttcgcgattagcctgatcaacgacgcggatgaacgcgttttgaatcatgccgaagtcctgttttcgtctgacgcagtcgtaaatattgacgacaaacacaagtttattaatctgagcgggcactttcgacaaatcgatgagaatttgttcatcatcaccgtcgccttcacccgtcaggttgtcacccgtatgtacgacaccgccgcaccggcttttcagattgccgaaatagatgacgtttttgctgtctgtcattttatcattttcaagcatcagtacggaagcgtcacagtcgatattggcaccgcctccgccgaacagctttccgaaaaagccgccggatgatacagggtcccagccgagtccgaccagcagttttgacaggccggcttttccttttgttaaatcaatccgctgtcctttttgtaaagagatcgccatatgattcactcctattctgtaagggtgccgctaagcacgccgcaagtgcgcatttttactaaattccgggacaagaatcccggtgtttattaagttatacgtcttttattatatcaaagtttcataaaacataagaatttttggcgaaaaacggcgaaaaattacttcctatattctccttcgttccggagagaatagagaaaacaaagaaattgacggggactgaacatttttcctatccttgtatcaatacatgtcaggaaaggggcagacgagtgattgatttaagcatacttgatcaggcgcccgtatccaaaggaaacgggccgcacgagacgctccgccgttcagcggagctcgcccgcctcagcgaaggatggggctataagcggtactggtttgccgagcatcacggcacaagagggctcgcaagcgtttcgccggaaattatgatcgctcataccgccgcagccacaacgtccatccgtgtcggatcaggcggcgtgctgctgccgcagtacagcccctataaagtcgcggaaactttccgtcagcttgaggcgctgcatccgaaccggattgaccttggggtcggacgctcaccgggcggcacgacgaaaatccggctcgccctcacagacggggtaaagaaaagtatgaccgagttcaacaggcagcttcaggatttatcatcctttctgacagattcggttccctcggaccatgcttatgccggaataaaaacagcgcctttgattgaaacagccccgcagctttgggtgctgggcctcggggaaaacagcgccagacgcgccgctcttcaaggtgcgggctatgtcttcggccatttcattaatccggaacgcggggtaaaagcctttcagatctatcgggaccatttccgggcctcctcccatttttccgctccggcctcactctgtgccattttcgtcatatgcgcagctacggatgagaaagcggaagaactcgccttaagccaggatttatggcttcttcgtgtcggaaaaggcgccgacagccgcgtgccgagtgtggaagaagcgaaggcttatccgtattcgccggaggaccgtaaacagattgcagaaaataggaagcggatggtgatcggctctgctgccgcagtgaaacgccgtctgcttgaactttccgaacgttatcagacaaaagagatgatggtgctgtgcaacgtctttgatttcgaagcaaaaaaagagtcatatgagcgtcttgctgatatatttctgtaaaaaaagccgtcaaacggcgcagcagatgagactgctgcaccgcttaacggcggttttttcgttcttttccttttttaaacgcattccaaatcccctgcagcataaagccgagcagaagcagaatgattaacagtaaagtgattgacggccccggaggcgttccgagctggtacgaagacgtcagccccatgaacacactgaaaagagaaataataatggccgccgcaaacacccatttaaaccctttggcgatacggattgcaaaagccgcgggcagtacgaggagcgcggaaacaagcagcacgccgataatcggaataatgaccgaaatcgccagccccgtcacgatgctgaatgacattgacaggagatttgtgttaatgcctgatgtcttcgccgtcgcctcgtcaaaggtaagcagatagagcggtctgtttaatataatgaaataaagcagaatcagcagggtaatgcctccgataatatagacctgctgctggctgaccgtgacaagcgatccaaataaatattgatcgatgctcatcgacgcgccgccttttgacaggctgatcagaaacatcgcaaacgacagcccggccgccattaagattgcgatggatacctctgaatatgtacggtatgcccgccgcatatattcgatgccgatcgctccgatcgtgacgacaacgatgctcgccgccgtaatattggtactgagaaaaaaaccgatggccacgcccgacaatgaaatatgagacagcgtatccgccatcagcgcctgtcttctcagcacgagatatacgcctaatatcggcgccataattccgatcatgcttcccgctagaaaagctcgtcgcatgaattccaagtcaaacatttccatccgcctttttcccccctctcaagccgtatgactttatccaaatactgctgtacttcattttgttcgtgtgtcaccatgacgacggtgcggttgtgatttttcacctgatgatgcataaattcgtagaaaccctgtctgctttcatagtcaaccgcggttgtcggttcatcaagcatcagcagatccggattgcttgcaagcattctcgcaatgcagattttctgcttctgtccgccggataaatcgccgattttccggtggcggaaatcccacatttccaccatcttcagcgcgttttccacctcgtggtgatccgtttcgttcaatcgtttaaaccattttcctttcgtataacggcctgattgcacaagctccagaactgtgcttgggaatcctgcgttaaatgaagaaatctgctgcggaacatagccgattgtcaggcgttttccggcagcgttttttttactgatctcggccgttccttcccaaggtctgagcatgccgagcatgactttcatcagcgtcgattttgacgcgccgttcggtcctgtaatgccgacgaattcgccgcttttgatttccagcgacacaccgtcaagcacgggtgtatgcgaataaccaaaaacgatatcctgtaatgtaacgagattcatgctgaccttcctttcccgcatagaaatagtgtgcaccccgcggcgcacactatgttatttaaccaatagcgaatctttcagtgcatcaaggtttttctccataatgtcgatataaccgatgcctttatcccgttctttttggcttaaaccttccagtgtattgagcacttccgttttcgcgccgatttcaccggcaagtgtatctgcaactttaggcgatgcaacttcttcaaaatagatgatcttcacatcatgctttttggcaaacgttttgagatccgccagtttggccgcactcggctcttcttcaggagaaaggcctgcaatcgcgacttgttttaagccgtattctttggcgagatagctgaatgccgcgtgctgtgtgatcaattcttttttcgacgctttatttaatgttgtacggtatagtttatcaagatcctgcagttttgcaatatattctttactatttttctcatagtatgctttattcttcgggtcctgttttacgatctgcgccgtaatggttttgacctctttttgcgcaagaaccgggctgagccacacgtgagggtccatgctgtggctgtggtcatgaccgccgtgtccatgttcctcttcctcttcatccgaaccttcgagcaagtcaattcctttcgacgcctttacaaacttcgcatgatcagagctcatgcttttttccgctgaaggaacccatgtctccatatattcgctgttgtatacgaaaagatcggcgttttgaatgccggcgatatccttcggcgtcggctcccaatcatggggttcgaccgaagacgggatgagaatgtctacatcgcctttgtctttgacaatttgtttcgtgaattcgtacataggataaaaggtcgtcacgacgtgcagtttgccgcttttcgaagaacctgacgaaccttttgaagatgaattgccgcagcccgccgcgattaaaaagcatgccgcaatgacaatgattccgctccattttttaaacaagccgtttccccctgttctgtaaatcagaatgatgacgatttccaaagcgtactttctcgttcatttgttacctataccataataaaacgaagtaattacgttttgcaagtaatttttttctaaattgataaccgatttacctaaaaagcccccgccatgtatggacggggcgtcgtatcacatatcaggcatgcagataaactcttgtttcgtaagggcggaacgtgatgcgggattccgctccgccgttattttcatagttgctgagaagcagctcggccctttcagattcggagccgtccggccaataaaaggcggcttcttctttcgatacgttgctgatggatatgattttttgtccgtttgcctgtctttcatacacaaacagctgcgggtcatcgggaaacagcagcgtgtagctgccttttatgatatcagcatactgttttcgcaggcggatcagttttttgtaaaagttcaatatagaattgggatcatcctgagcctcggccgcattgacggttttgtaattgggattgaccttcagccacggttcgccctccgtaaatccggcattcttgctgccgtcccactgcatcggtgtacgggcatgatcgcggcttttcgccataatggacgccatgacttcttccctgttgcggcccatttcaaatacccttttgtgatacatattgacggtctgaatatcttgatagtcctctattctgtcaaacggggcgtttgtcatgccgagttcttctccctgataaatgtacggcgtgcctttcatgaaataaagcagggcggcaagcattttggcggatgcctttcggtatttgccttcgtctccgaagcgggatacgatccggggctggtcatgattgcaccaatacagcgtattccagccttgatgttccagtttttcctgccagtctgtgagcactttcttcaaatcggacagctcaagcggttttacatcccaatgctcttggcccggcttttgatcaagctccatatgctgaaaatgaaaaatcatattcagttcatgctcatcggttcccgtgtaaaccagcccctcctcaggcgtcactgatccggcctcgccgaccgacatcacgtcatattttggaaaatacctctttcgtcatttcttttaagtaatcatgtatccgtgctccgtttggccggaaaggcttcggatctgcccggcgggcgatgtaatcttcatatggcggcaagtattctttttttgacagaagatgaagctggtctattcgcaatccgtccacgcctttatcgagccaaaatctcatcatctcgtatactgattgccgaacctcgggattttcccaattcagatcggcttgtttaacggcgttcatatgcaggtaatattcgcccgtatgttcttcgtactgccagacggattgtccgtaatccgacacccaatcggtcggcgggccctccgcggtgcccggccgccaaatataataatcgcggtatttgctgtccggattcatttccgcctctttgaaccaaggatgctccgtggaggtatgatttaaaacgaagtccatcacaagctttaatccgcggctgcggcattctgtaagcagatcgtgaaagtcctccatcgttccgtatgattccataatcgcttgatgatccgtcacatcgtagccgttatcgacgtttggcgacgggtaaatcgggcagatccatatcacatcggcgccaagctcttttatataatcgagacgcgcgataatcccccgcaggtcgcctatgccgtcgctgttcgtatcttggaagcttcgcggatagatttgatagacaacggcgtctttccaccagtcattcgccatcttgcggccctcctgttttttagagaaccatttcctgtatgccccttctctaaacaaaaaagagaaggtttcccctcctcttttatctttccagctgggacggataaagcgtcatgcctccgtctacgaaaagtgtcgttccggttacgtaactcgcttcttccgacaccatccatgcggcggccgcggcgacttcttccggttttccgaaggcgttcatcggaatttttttcagctgggcctgtttatgtgtttcatcttccagatccttattggactccgtggcgatcgtgccgggagcgatggcattcacccggatgcctttgtctgcgtaattgagcgccatcgtttccgtcatcattttgatcccgcctttggatgccgagtactgcacgttttcaggacgcggtatttgctgatgaacgctcgatatgtttaagaccgttccttttttgccgtgctcgagcatatgtttcagtgccgctttcgcccccaaaaaggtgccggtcacgttgacgtcgatgaccctttgccaatcctccaggctcatttcatggggcatcgcttccgctccgttaaagccggaattgttgaccatcacgtccacgcccccgaaatgctcctgcgcggcattaaacagcgcctgaatcccttcttctgaggatacatcggcttttacggtgacggctctgcctcccgctttctcaatgatatccgccgcttcttccgctccggcggaatcaccgaggtagttcacaaccacattcatccgctccttgccgaagcgttcggcaatggcttttccgattcctttcgaagaacctgttacaatcgctgttttcccctgtaaatcctgatacattgtctcatttcctccctgatgttaatacagagcatgtacccggttttaatcggctgaaaacaaaaggaatcataaaaagaacgatgaaaccgaagctccctcgttcttttttttattatgcgtagttgttcatttgcagccttttttgcacgccgacaagcctgctgaaaaaataagatgccgctttgtagttctcccgtttatgaaagaaatgagccgcgtcctgaagcagttcctctgtgtcagccaacagctcctttgattccaggatgtcaaaatactctttgagcgaatcctgtccgccttcccctgataaagctctttaatcagacggaatttcgtcatatagatctcatcttcccactccgccgcgcttctcatgccccgcgcgcagctggcggcggcttcactgtatttttccgttttaaagtagatatgcgtgagtgaaaaaacagcctggatgacctgccggaagctgtgtgcttcaaatccggcagccgcccgttcaaaatcctccgccgccttgcaaaagtcacccagactgtacatacagtgcccgatattataataggccgcagcaatcatatattgatcatcaagccgctccgcgtgctccaaggcgcattcgaggtattccagcgcttttttatgctgctgggcgtccatcagatttccggcaatgataaatttgcactgcacccttctcattccgtataattcatatttcttgtaaatatcaagcgcctgccccgcgtaattcatcgaaaagaaagtctgcttgatatgatagtacacctcagaaattttatacagaaactcggctttctctatgtcatcttccacatattcaagcttttcctcagcccgcttataatgagaaatcgctgagatgaagtttttctgcttaaattcatacattcctctgaaatagtaaaaataatattccagtaagccggtcagcttttgctggttcatctcaatctcagtgagcatttcagagaacggaggctggcagtcgccgtctttcatgggttttaatttatccagcatgatgcggtgcctaaattccatcaatgaaaaatacaacaataaatcctgattttcttccatatcttcgagttcatattgaatctcccgcttcagcgcttcagctttatcggcttcaaacgcgcggatcagcttataccattcattcatctttacggccacttcttcagatggaatcttggatttcatagatttgcctccttcctccggctactaattatgttatattttatcatagcaaatttatggcagtgagcaaacaaagattttaatcaattaaagaaagagagaattcaccatgaaactaccagtcagaatttcgctgcttctgatcctcttcttttccgcagacctatgtttttcctatgtgcagaaagaattgaggccgcagacggcattacaagatagagccattccaagcgctcttcatccgctcgtgaaacagaatgcggagctattgcggacggccgctctgaaaaaaggcatcaccgtcgttatcacagagggtttcagatcaattgaggaacaaaacgaattgtaccgtcaaggacgttcaaaaaaaggaaatatcgtcacctacgcaaaaggcggggaatcttaccacaattacggccttgcgatcgacttcgccctgcaaaaaaaggatggaagcctgatttgggatatgacgtacgacggaaaccgaaacggcacgcccgattggcttgaggtcgtatcgattgccaaaacgctcggttttgattggggaggcgattggagaggctttaaagattatcctcatttacaaatgatccctggctaataaaaccttttcttttttcgcttctgcgcatcaatgtacggaggatagacaggcctgtacacaagcttatatccttcattgccggacggcgtaaaatcgcgctgccactccagccgcagatggaaatcggataaaaaagcggcctttgcttcttcgggagtaacggccggcaccggattgatcttctccagctgctccgggtcaatgtcaggcgccatataagcttccacaagccccgttacgggactgacaagtattctcgcagcgccgaaccgcagcggaatatcctgatgccatacggaaaaatggaagcggaacctgccccttccgtccgttttcagcgggttcattttaaaaaactcgtccgctctcggataaagcttgtataaaaattgaagcgcgacggcctcacactcttccgcagaataaaaggccgggccctgatgctcaataaaagatttaaaggctgtcattttccctgtctttttgtccgttttcatcttcattgtatttttgttgctggtttcaaaatagctttcgatactcaaatctttccgttccggaaccgaccctttccgccatgtcgttccgatctcatccccgagatcgcgccggcgcgtctgaaccatatccgaggtaaaccccatcaattcatccaggctgatttcccgtttatgttcaaacgcaggaagcggttttgccggctcattcctgtcttcgcaaagctgctgatccggcacgatatcatcttcaccggccggatagctgtaagccggcagaatcggttcatagacgagacgcggtatgttctcaaaattgaccacatcatagacgagactgaatgtcagcacactcatataatgcgagacgactttttcccgatcgacgaatgtttccgggacgggcgcttcacccttatccccgtaatagataaactgcacgacgaagccgctcctggttacatcaacgaaaaaacctgaatcgggaagcggccggccgagcactttttttgtatagataaatcggatgcacccattgcgttcttccctcgcctgaaagatgaaattcataaaagtaagcgggcggtgtctcgccgcaaaccgaagagccgtcagctttaattcggcgtctgacagctgcatgtctgaacccggacagtcgttgcgtgaataggtaagcaaagatccgtcgtcgcccagctcaatcgttaccgttttatccggatggttacgatctttccatatataataggctctcgttttttgtttttcatcataatcttctatttcaagctcatagtgcggcggtatgttcccgatctccagcgctttttttctcagatgttctttcagcaatggggtcatcctttcagaagagtgtataaaaaagaactgtttttaattatataaaaacgtccttatccttttaaagggaagaaagtgccttttatgtgtctatttttagcaaagagggaaaagagccgtattcagagcggctgtttttcatacaatagtcacaattcccgcaaaagacccgggacgaacgcccatgaccttcagcctattaaactcgtgatcacttctcccgtatgggcctcaataaaccgcgggaaaaccggcttgtatacgagcctgtacacttttccgcagctgccgtcatcgtaacaacgatcccaagcgagctcggctttgatggcccggcggatcgcgtccttcgcctcttccattgtcaatgaaggaacgggatcgatttcctccagctctttcggatcaatttccggcggcatataaaacgtgacaagacccgtctttttgctgacgcagattctcccctctccgaatcgcaaatcaacgccgcccgaacaagccttatatgtaagtcccacgttttctccttcatcatccggctcatcatattgaacccggaaatactgatccgcttccggaaacatggcgaataaaaagcggatggccatgtgatggcattcttcctcggaaaactccggttcgccttcactatgtataaatgacatcactccggcgagccggcccgattctttatcatgcattgttttcaatacatgttcattccgttctttaaacagactttctaagcttttatctttccggacggattttgttttttcaggacgccatgcaatgccgatgcggccgtctccaagatcagtttccctctctttataaaaaccgtcgtgcagcccgatcatgtcattgatgctcatcttttccgcttcaggtgcagggcgtgaaatcgggacatacggcagcatgtcgtcttccagcccttcatattcgtctatttctgcattctcttccttcaggtcagccgatatcggccgcgtcggagacacgatttcatagacgagatgaggcttgtcatccccctgcacatagacggactgatgcagtacggtgaacaacagctccgcttcaatatgtttgacaaagtgagccaatgcttcccgcttgtccgcaattgttccgggtcttaagagattatcagccttcccatggtaagaaaagccggttacttcccctgtcaaagacaggtcggcgtaaaacccggtcagcggaagcggcagaccgtcagccatctgaacataggaatatctcacatcaccatcatttgcggagccgctgttttccaattcgaactcagccaatgcccccggacgatgggtttctacaaacgcccgcatccgttcttctatgtccgattccgaaagagccggcagatcagtccggaaagccggacgggataaggatttcagttttccgtcccggtccaattcgaccatgatgccggcttccggatcattcttatcttcccaccaaaacaaaacctcatcttcttggtattcttccacattactttcgtagcgggcaggtacgttaccgatccggagagccagctgtttcaattcttcttttttcatcataacacttccttttcttccaaaaagattgatgattaccaagactcttttatacaaaactagtataattaacctgtctgtcttcatgactattgaattaatcattataacaacagggggtaaaccagatgtccatcaaaaaaatgagcgccgtgtttttcatactgcttctcacggcatttaccgccgcatgcagcagcgaaacgagcggcggccaggaaagcagcacggcgaaagtgaaaataaaagagacggcatgggccgcttcagacgatactgaacatccggccgcgctgaaagtaacggtcaccgtcaaaaatacgggcaaagacccgcttaccgtcaaaagcagcgacttctcgctttatcaggatgacgcgaaaacagcggcggccgataaggatgaccagatgcagagcggcacgcttcatgcgggcaagacagtgacgggcaatctgtacttcacggctgacgaaggcaaatcatatgaattggtatatcagccgcaggcaaaagacgcgaagcctttatcttataaactgaaagtcaaaggcacagcctcaaacgcaaaacctgacccggcggacgcattatccgcatacattgatgtgatgctgtacggcaagcacaataaagatttcacccgcctgaccggtgtaaatgaaaaaatgacggccgccgcatatcaggaatcggcgaaagccagctttatcgcttctgcaggcatttcacaagaacaggcggattcaaaagccatttccgctattattgacgccatgtcatcagcgcttcgggataacacagagctcaaggtgcataccaaatccatgtcaggcaaaaaagccgtccttgaagcaaaagtgacgccgcttgatatgtctccgctcgcgggccagctgcaagaccgcgtgcaagactatgccggaaagcaccccgatgctgatgaaaacgaaattgtcagccacctgctttctgtctatccggaagagtttatgcgcctgaaaccggcttcttcttccgtaacaagagaaatcgagatgaagaaaaacgcccgcggccagtggtatctggatacagacgccgatctggaaggattgacagaagcgtttttgaaaacgtcctgacagcaagaaaggaaatagcgcaggctatttcctttttttattttcacttgaagatgtcactgatatattgaacctcatcctcggtcaattgcacatcaagcgcgcccagattgtgtttcagctggccggggcgtttggctccgggaatgatcgcatccaccgccggctgcgacagaagccacgcgagtgcgatatgcgctgtctgcgcccctttttcttccgcaacggcccgaagcttatccactcgctccaggttttggtgaaaagcttctccctgaaacggcggcctgttttttcggctgtcctcaaagactgtgtcttttgtaaactttcccgtcagcaagccggaagcaagcggaaaataaggaataaaagaaataccgttcttttcacaataaggcagcagatcatgctccgcctcacgctgaatcagtgaatattctgattgaaaaacctctaaataaccgtcggcgttaaactcctgcaattgcccgaagctgagattggacgcgccgattgctctgattttcccttcgtccttcagttcttttagcgtgcccgccacttcggagagcggtgttttgccgtcagggaagtggacgtaatacaaatcaatcacgtctgttttcagccgcttcaggctgttttccgcctcactacggagaaattcacggctgttgtccagctcgatttgtccgttgacctctttgtgcgcgccttttgacgcaatcacgaggctgtcccgcacgccgcgctctgcgacaacttcaccgattaactcttcggaacgccccaaaccgtatataaacgccgtatcaataaaattgacgccgccgtccaacgctgtgcggatgagttcttttcccgtttcatcattaagattcggaaacagattatgtcctccgaccgcattagcgccaaagccgatacgctttacccgtaaatccgtcctgcccagcgtacgtgtctcatccatggctcaggctcccttccttttatcgctctgtttagtattagataactggtaagaattatcctgccccgagagcatttctgcagaaaaaaccttgaaaagcatgtgcccttcaaggttttttggctgtgtattaagatgtcagagctgcggcgaagcgttcggcttcatctgtgagagcaccttcgatttccttatagcggctggaaatcgttgaggcgctgacgccgtacttcttcgccagcttggcttgagaaacggacgcgccgttcagagaaatactgtttacgtaatattcaaccgccgccgcgaaagcttccggctttctgatcgtcggtgtttttttgacacagaacgttttccacaggtcaataacggccggaaccagctcagccgggtattcatccccgctcaggcctttttcaatggcgtccgccgtttccttctccatgtcgttcgcccactccgtctgtttttcttcagcagcctgctcaggctcttccgccgttcctaaaagagcggccagcacagtgtcgaagtcctcctgcataaagcgctcaggcgattttccttccgcaagggccggggcagccgcctttttcactttgctgattagagcttcggtccgcttcacagggaagatcgtaaactgcataaagaactccgctttttccgcttcgtggatcggatagccgagaatcaggcttcccgccggcggaagatcctgctggctgacgtccatttccactttgaattgtttcttggtcatcacatcttcaaagtgaatcattccttctttcacatcttcaagcaccataaccgctggtgtcatgcttttccatgattcaacgatttcccgtgttttcggacggttgatgccgccggcttttttctgaagatattcttcaaaaatcgtcttgccgcctgccagcggacggaagaaaattccccagataccgaggttgaagactccgatgtctttagtctgtctgtccagctccgtaatgaactcatgctggttaataaatgatgatatgccgtctctatgtgctgtaaaggcgtactccattaagctttcctgaatctgtttcgcttcttttgccgcgatgtctgccggaatggcagcttctttgcttccgcagcattttttatatttcttcccgctgccgcatgggcaaggggcatttcttttcacttttcccacaataaaccctccgaattctgatataactttattattttaacaaaaataacttcagagggcttggtttacggcgaaaaaagaatatggaagaaaaaaaggccccgggatattctcattctccggggctttgaaactgttaatttgtattttgtccgccgccgttcagaccttctttaatcagcccgtttacttggctgttcatcaaaagtccgatgtgtccgacaccgtgaatctgcacgtttttcccgccgatcagtcgtgacagcgggttcagaacgatcaagtccgctgagctgtaaatcgatgtatataaaatcttttggttcggatcagtccccggaagcgcccggttggtcacaaggccgttcgctccgccgagtgtgacgacgttggcgattttgtctccgccgtcaagatttttaatgtaatagagcgtgttggcgccgcccatgctgtgcgcgacgatatcgacttttttcgcacctgtttcgctgagcacttttttcacgtaattggacagtctcggcgcattgtgtctgttgtttccggttttgtctaagaaatcaatagcgtacatctcttttcttgaccagccttgggatgccaagtatgttttgattcccgcaaagttaaaagacgccccgccgattccgtgaaccatgactacagggttatgccctgaggaggctttcgatacggtcggctggaaggcaaatacggaaatgacggacagcatacaaactgtaaggatgactaggattttgctttttatatgtttcatgaactttcctcctgctatgtaatatttttgcagttttcattctattagagaagaaaaggaaaaaatagtgtattttttactgttttcaacaattaaaaaagagcggaaaaatgagaaagacgcccctttcccgaaagcacgcttatgctttaatacggcataccgacaaaggagagaacacccggttctctactcctagtactcattgaaataggtttgaatccgcttaggatcttgcgtttttgtcagcgcgagcatgagaagaatccgcgctttttgagggttgagagagtttgaagctgtcaaatggtctttttcatactctcgattaggtgttaccgccccgtttcccgtccttgtggagcggacgaccgccagcccgcttttgaccgactttacagcgccttttagcgccgcatcagacattgagccgtttcccgggcctgcaaaaataatgccttgcgcccctgattttacggcggcttcaaagagatagcttccgtcattttgatagccgtatataatatcgacctgcggcagtttatcaagtttatctatcttgaaatctgtatccttcgtatgctttcgggtgatgatgttattaaaatagacgtcatcagcaattgttccgatataacccatttcttccgatttgaaagtgtcggtcgcggttgtattggtttttgtcacataacgcgccgaagcgattctgtcatttaatacgacaagcgtccccttgcctttcgcctcaggcgcagccgctgtttttaccgcgttatataagttggacggcccgtccgctccgatcgccgtggacggccgcattgacccggcgacaacaacgggtttgtcactcttgaccgtcagattgagaaagtaggcggtttcctcaagtgtgtctgttccatgtgtaatgacaatgccgtctgtatcatcagacttgagcagcttgtttacccgttttgcaagtttcagcagtgtctcgttattcatattctggctgccgatattcacaacctgttctccgctcacatgcgcggcctcttttatctccggaacggcctgaatcagggcatcaactccgattgcccccgccctgtactccgtagcggacgtctttgaaggagcagcgcctgcaattgtgccgccggtggcaagaattttaatattcggaagtccgtcttttttcgcagaggctgcggctgccatctggggcggtgtttctttcgtttgaggagattgggagcagccggccgcgatgaagagcagagccgtgataaatgtaatgaagggcatgaattgttttttcattcttttctctccttttctttatttatgatgattttcctctcaccggtcaacgcgcttgtcaggcattcttccgaagaaaataaccgttaaaaaaccttgacaccgtcatgcgaaatcaagataatagaccagtcactatattttaaatttgtcacaaatcagtaaggtgggaacattatgagctatggagattctcgggaaaaaatcctcgccgcggcaaccaggctgtttcagcttcaggggtattacggcacgggactgaatcagattattaaagaaagcggggcgccgaaaggttctctttactatcattttccggacggcaaagagcagctcgccattgaggctgtcaatgaaatgagccattatatccgtatgaaaataaaagaaagccttgatgctcatcttgatccggcggaaagcattcaagcgtttttacaggacttatcaagccaattcacatgtccggagaattttgaagggtttcctgtcggtttactggctgccgagactgctttaaagagcgaaaagctccggcaggcctgtcaaaacgcttatcaggaatgggagaatctgttcgcgggcaaattaagatcagccggtttttctgatgagaaagcggcggaaatcagcactgttttaaatgccatgatagaaggcggcatcattgtgtccttagccaaaaaagacaaaatgccgatcctccatatttctaaacaaatccccaacctgctgaagacataaaatacgagagacatgtacgtatagaaagagaggagaatgattttggaaaacgctcagccttccaaacaatataaagtcatgccgatcatgatttctttgctgacggcagggtttatcggcatgttcagtgaaacggcgctgaatatcgccttgactgatctgatgaaggagctacatatcactcctgcgaccgtccagtggctgacgacgggctatctgctcgttctcggtattcttgtgccggtatcgggtctgcttttgcaatggtttacgacgagacagctgttcatcgtttcactcgctttttccattatcggcacgctgattgcagcgcttgcgccgagctttccgtttcttttggcggcaagaatcgtgcaggctttaggaaccgggctgctgctgccgctgatgtttaatacaatcctcgtcatcttcccgccgcataagcgcggagcggcgatggggacgatcgggcttgtcattatgttcgctcctgcgatcggtccgacattttcagggcttgtgctagagcatttgaactggcattggattttctggatttccctgccgtttcttgtgttggctcttttattcggcatcgcctacatgcagaacgtgtctgacattacaaaaccgaaaattgacgtgctttccattattctgtctacgatcgggttcggcggcatcgtattcggattcagcaatgcaggcgaaggatcagacggctggtcaagcccgacggttatcggttcgctcactgtcggcgcgatcgcgctcatcttattttccatcaggcagctgacaatgaagcagccgatgatgaatctgcgcgctttccgctatccgatgtttgttctcggtgtcgtgattgtgtttatctgtatgatggttatcttatcgacaatgctcctattgcctatgtatttacaaagcggactgatgctgacggcgtttacgtccgggctcatcctgctgccgggcggtattttaaacggctttatgtctccggtgacggggcgtctgtttgataaatacgggccgaagtggcttgtcattcccgggtttgtcatcacggcaactgtgctttcgtttttctcaaacattaacggcgcttctacggcgcttctgattgtcgcgcttcatacatgcctgatgatcggcatttccatgatcatgatgccggcgcaaacgaacggcttaaatcagctgccgccggaattttacccggacggaacagccattatgaatacgctccagcagatggccggcgcaatcggcactgcggtggcggtcagcatcatggctgccggccagaagaattatatgagcaccgcgaaaaacccgaatgatccttccgcatactctcacgcgctgattgcgggcgtccagcacgcctttatctttgcgatgattgtcgccgttatcggcttgatcagcgctttctttatgaaacgggtcaaagtgaatcattcataagaaaacagcagactccccgtgagtctgctgtttttttatataccgcgcgcttcagccagttcatcaatcgcatagatcagatcgtcagctgtgttatagaaatgaggcgccagccggatgatttgtccgctggatgcgcatacgatgtttttccgcctcaacagcgcagccgtttccgccgctttttcatcccgtatggaaatcatgccgggtctgtcatcggcagacggcggccctgtgagattcagtcctttttcagaagcgtattcatacgcaaatgcgctgagtttttttacttcttggtgaatgcggtctgtgccggcatcgtttaatagagataaagccgcctgtgccgcatatatgctgataaatgccggggttccggtctcaaagcgtttggctccgtccgcataagaaaaacgggttaaatccggcatcgacgcccgctgctgcccgaaccatccggtgactttcggcttcagccgttcggcaagttcctttctgacataaagaaacgccgttcccggtatgccgagcatatactttctcgcacccgcggccagcatatcaactccccattcttttacatcaatcgggatgtgccccgccgattgataagcatcgacaaaaagaagcgatcccttctttgcggatatctcggcaatgcgctttatatcctggacaaaacccgacgtatatgacacatggggcacacaggtgaaaagcgtctgctccgatatgtacgtctcataccgctctaacgggatcattccatcttcagacggcacgactgaaagctccatctcagtctgtgccttcaaaatgtgggcgatcgccggaaaatccaattccgtatacaccgcctgtttctttcggcaatccggtaaagcagaaacgacggcagagacagcagccgttactgaaggtaaaacggcgatttcttcaggatgggcgccgatcaattttgcaaattcacaccttgcctgctccgtacgtccaatggcttcttcccagtttccgccatgctgaaacaggctttcctgatagtcattgaccgcttttgaaaccggcagggcaagagcgctttgagagcagctggcgagcatcgtatgtgtgcggagcaccggaaataaagatcggtattgcaccagaggcgaattcaagacatggttcccccttcggcaggaatatatgtccattatagagtatggtaaaaagaaaaggagggttttatatggagaaaaaagtattactgacaggctttgaccccttcggcggggaaacggtcaatccttcatgggaagcggtcaaacggctggacggttcccatgaaggccctgcctctatcgtatccgaacaagtgccgaccgttttttataagtctcttgccgtgctgcgcgaagcggtcaaaaagcatcagcctgacattatcatttgtgtcggacaggcaggcggcagaatgcagatcacgccggaacgggtcgcgatcaatctgaatgaggcgcgcataccggataacgaaggaaaccagcctgtcggggaaaacatttctcaaagcggtcccgcggcctattggaccggccttccgatcaaacggatcgttgaggaaatcaaaaaggaaggcattcccgcggctgtatcctacacggcggggacgtttgtatgcaatcatctcttttacgggctgatggatgaaatcgcctgccatcatccgcacatccgcggcgggtttatacacatcccgtacattccggagcaaaccttgcagaagtctgcgccgagcctcagcctggatctcgtgacaaaagcgctcaaaatcgccgcggtgaccgccgcggcgcatgaggacgatattgagaccggcggaggcgagcttcactaagcggcagacacctcggcccatttcttccggtaaacgatgcgggacagcgtcacactgatttcatagaggacgagcagcggaatcatgacgagaaagtcagacataaaatccggaggcgtaatcagcaccgagacgacgatcagcaaaaaatacgaaagcttccgcgcctttgccagccgggttggattcacgattccgagccgtgtcagaaacatgacggccagaggcatttcaaacaaaaatccgaacggcaatgtaagattcagcataaaggtaaaatacttgtccgccgtaaataccatgtcaaaatggccggcggataattgtgttaaaaatccgagcacaatcggaaacagcacaaaatacccgaaggaaattccgataataaacaaaagcgaaagccccggaatgtaaagcaaagcggcgcggcgttcgaacggggtcaaagccggcgccgtaaaacgccagagctgaaaggccgcaaccggaatcgctgccgtaagggcgcatattcccgcaatcatcatatacacccataaaatctcgctcggccctaaaacggccagcctgccatgcaaatccttgatcagccagtcataaatatcctgcacaaaccagcaggcgccgataaaaaacacgagaaaggcgataacgattttaatgagacgctgccggacttcctctaaatgcccgatcaagtgggtttcttttttatccaatcgtacatcctccttatagagaaagaggcagaagcggattcgtctgcccccatgtcaggattcagcctgccgttttgtctttctcagccgtctgcttgtccggctcttcatttgagaccaatgtttttgcggcgcttttaaattcaagcagcgtgcggccggcggcacggccgatttccggaagttttgaaggtccgaaaatgatgagagcgatgacgaaaatcaggatcaacccgggaatgccgatatttgaaaacatgagtgtgcctccttattgtgagattttggcccgtttctttctcatttgcttttcatgcgcattgttatgggcgaagaaacgatcctcttccacctcgtttgactgctttaaaccgcctgcaaccgccgcttgagagaccttccgaatccccgtctggtctttctgataaatgaatgaagcccgcgtggatacctcagcccccggctccgtcacgtacggcaccactctgtaatccgctctccattgggcaggagtcaccgtacagcggacatagccgcggtaatcgttgaaaaacttaatatgcgggttttgttttaagatctgatccgtatcggcccgtttatccgccccgtttcctccagatgtaatggaagtcccgacgaattcggctccgaaaatttttgaattcgtttgattaaaatcggtatgcaggtttgacgcccagcttgcatgaacatcacccgtcagcacgatgacattgttcaggtttttgctttttataaaattgatgacccgctcccgctgagccgggtagccgtcccatgaatccatgctgtatatcggattggcggttgttccgaaattccattgcgcgaaaaagatttgctgcgccagcacattccacttcgcttttgaggcggctaaatttccgaagagccattgctcctgctctgtccccatcaatgtgcgcttcgggtctctccactcatcagaaggcggcttattcccgtcgccgttggcctgatcatctctgtactgtcttgtatcaagcacattgaacgatgctaaattgccataagaaaattgcctgtacagccgcatatcaggaccgttcggcaatgacatgcgcctgagcggcatgtgttcataataagcctgataagctgcggccctcctgagcacaaacgcttcaacggattggcctttttcagggataacattggcataattgttttccacctcatgatcgtcccacgtcacgacccacggaaatgcggcgtgggcggctttcagattggcatcagagcggtattgggcgtgacggttgcggtaatctgacagtgtgtacacttcggcgctgctgtgcgtcctgacatttcccgtttttgacacatattcgttcggtccgtattcataaatgtaatctccgagatggaatacgagatcaagcttttccttcgccatatgtttatacgccgtataatagccgtgttcatactgctggcatgaggcaaatgcaaacgtcatggccgatacgtcagcgccgggagcgggcagcgttttcgtccggccgacggggctgagctcatgcccgcttttaaaccggtaatagtacactttattgggcttgagcccgtccgcctcgacatggacggagtgtccgagattcggcttggccatttccgttccgcgtttgacgatgtgacggaaatgttcatctgcggcgatttcccattttaccggcacggcctgcttcggcatgccgcccccattcagcgggtcaggggcaagacgcgtccagagaatgacgctgtcagacagcgggtcgccggaagctacgccgagggtgaacggatagtttgaaaatttcggagcggcattcacttcaaacgcgccgatggattgcgcgatcgctaacccgagggaaagaccggcgattttcccggcgccctgtataaatgcgcggcggtcaaacgtattgttctgaaagcttttgttctccaattccttgatccattcatctaaacggccgtcatgtgtcatgtcagttcccctttcgtcttattgatcgcccttattataaaaaagaaatgttaaaccgctatgaagaagtgtgaagggtttgtaaggctgaaaaatgaacggcgggagacatttttcacattgtttcgacaaaccttgccccgccggaagaaaaccccctctgtttctttttggcttgtcatccgtcaagcgcacttttttcctatttttcttcacaaaacattaaaaaaacaccgttcattttaagaacggtgcccccgggattaaaatgtattgtacacgttttcgcacgtctcacctgtcggctgatagaagcagtgggatctgaatctggcgacaaacggctggccataccaagtctgcgggcagttgcccggcggcttaaagtaccacagactgaacttagccggccaaaaccgttctccgttaatgttcctgcgggcaagcctccgctcggattcacgcggtctctggtaaaagtatccgtgagtcaccgcttcaaacgcgtgcggctgaaacaccatctgcctgatggtgcgcaggcctttaaaatcagaacaattcgcccgcacccgattgattcccacattgccgaccaaaagcattccctgcttcccttcgccttccgcttccgccctgagcagccttgccattagatcgacatcggcgctcgacgcttttacgactgccatcatgacacctcccgtattttctcctttcatcatattcagcagcggcccagtgatgacagccaaaagccagaaaacaaatgttcacgaaaaaagggtttatatttcacgttatgaggaaacatactaacatgatttccataaggaggaattcgaatggaacacattaaagcgcttgccattaaaggcattatgaccatcattattctgtatctgatactcggcttaggttttcgctttacattcggtgacgtgctgctgatgaccattgtgctgggagccgtttcctactttacgggcgacctgtacgtgcttccgagatggaataatatcacggcggcgtccgctgatttcggaatcgcgtttcttgttgtctggctgatgggaatgccgctgtccatgggcatttccggaggaagactggcgtttgccgctctcatttccgccgtcatcatcgccgtcggagaatattttttccatatctatctgatgagaaaagacttgggagggtcccgttttttagaaccccggtccgaataatgtaaaaaaggccggataacggccttcagcttgtagagaaaatgatgttttttctgcaagcttttttgttttttgctgtttctttacatatgcccagccttgcttggctgggtatgcggcaaccttcaacatcattttgaataagatcagcggatcaagtgaggggcggcctttattttcgttgcagtaaggtttgaccttttcaacgataaaagagaagtctatgtactgatcaatttttcgaagcaggtgatcctcttcaacgagttggtcaaacagaacgaattcggctgtattttgagaagcgtctcttgtgcgggtcttttattatatgacaggggaatggatattttaagggaaaaataaaggctgtcgagattttctagacagcctgagccccttaaagggggctttttatttgtaaagtaacgctttatacatcttgatataactgataaacccttttcagccttttttcgagctgttcaaaatgaacaaagcgggcttctctcagaaactcagtcccatcaatgaacaaaagaagcacggggacagtgaagactgaaaatctgccggcaacctcttctacctcgtcagcgttggtatgccccaatttgatattcggaaactgatccaaaacttttctgagctgcggcagaacagcgtgacatactgtacaggcaggtcttgaaatgtagataaaactgaattgatgctgcttaataaaattctcgatagaatctaatgaatgtaagtctgtcagctctttcatcaaaaccctccttcaaatcggctcgtctttcatgaccaagctcatcaatactcgtacattcactatacacatttatattgatcatatccgcttttttgcgattcagagcaccttaacgtcgtgcttgaaaaataaaagaacagttaccgcttttcagtaactgttcttagatacttatattaaaaatgcaaagcgtaagctcctgaaccgatgagtgcaactccgatggagactgcaatcagcaccacgttatattcaaaaccgccggcaccgttcgcaaaccctttcgctccatgaacttttacaatggcacctaacataatgatcgttatgatagcagctccaagcgggaggaatacacctaaaataaataaaattccgcttgcgagttccccgagacctgataaagcggccgcggcattgcctggtttaactccaattgactcgaaccattgtccggttcctttaatcccgtatccgccaaaccagccgaataatttttgtgatccataaaacagaaacaccacaccaatcatgattcgaataagtaatagtcctgcatcttccatttttatctctcctcatctttgatttcatctgattctttgctggacggtaccatccagcaatcatcaattgactatatgtttctttattttttatgtgtcaaatcaatctaattctcttacttcaaacggcagcagcccttgttcaatttgtgcccggtgcggttcatactgctcagggagcatcaattttccgcccattgtttcttgtgactcatcatgggcaaagcccggcggatcagttgcgatctcaaataagatttccccatgttctctgaagtaaaccgcattaaaatagtttctatcctgaacaggagtcacaccatatccgtgcgcagcaatgaatctttgccaatctaattgatcttcgtcatcctgagcccgccaagcgatgtgatgcactgtgccgacacccatttgtccgcggccgatcggcgttaatttaagatcaatcacattcccgatatcaccggcagaacgataacgaacgaagtctccttccttgccgactcgctcaagccccatgatgttttccagcagttcacctgttttttcaggctgtgctgataacagggttgcaccgccaaagcctttaatggcaacatccggggttacatctccgaaagtccacgtattggcctcccctgcttctctttccacgatttctaaatgcaggccatgcgggtcatcaaattctatatattgttccccaaaacgctcgatttttgtgtatggcacgttgaacttttcaagtctcttttcccaaaacgccatagcacctctcggcacgacgtaagatgtcacgccaacctgtccgtctccaatgatgccttgacgggcgtccgcccacggaaagaatgtgatgattgttcccggcttcccgccttcatccccgaaataaaggtgatacgtacccggatcatcaaaattgaccgtttgcttgaccaatcgcagccccagcactccagcgtagaaatcagcattctcttgagggtggccgacaattgctgtaatatgatggattcccatcgtttttttagccatttttatgcgctcctttataaatatttaaatatactccacaaactcattcacaggctttcggtagccgcgcggccttctgctttctattttttctttcccgattgtaatcatcatgacgacctcaaattgatcatctatattcaaaatctgtttcacggcttcaggatcaaaccctatcatcggacaggtgtcccagcctttttccttagcactcagcataaacatcatcgcagaaagtgaagcatttcttatcgcctcatctctcttaaacagttctcccctgttttcataaaacgaaacggtgttttgaaccatgtgatcatactcttgtttatttaatacccccagcaccttcaatccttcatagatgtcagccgcttgctgatatgcctgcttatcccctaaaaccaaaagaaccgctgatgagctgaacactttatattgtccgtttgcggcctgcttcagcttttcttttacctccgggtcaagaaccgtcacatattttgtatgctgcaaattaaaagctgatggagccaacgcaaccaattcaaacatttcgttgagctcatctcttgtgattggatgttctggaagaaagttgcttgcagatcttctttcattcaccagctgtacaaattcagccatttctctcgcactcccctttatctcgaattcgagatattatggtataaaaaatcaaataatgtatgatcaaaaaacaaaacgatcggcaggttcttatcctgcactctaattaaattgtctcgaattaaaatatcttgaattcaggataataataaaagataaatactcaaatgtcaacagttcatttttaaattcagcgcaattttgtttatgtactatttagccctgctccaactttttttctgtcaccttatttattagtaaacaggaaacaaccttgctatagacccactcgaaactgaattgatatgataagcaaagtgattacacaagaaaggatacggagagcgaatcaagagcgctcctatttttttgtgcagttttataggaggaaaaaatgacaagtgaaagagaacaaataagcaaaaaagttgctttgattgcattgatagccaatctgatcttaatggcaggaaagatcttttttggactgataggcgatagtgaagcagtttttgccgacggtatacattctgcagcggatgtcgtggcttcaattgctgtcctggccgtcatcggcatttctaataagccgcccgatcaagaccatcctttcgggcatggcaaagctgagatcatcagcgaagcgattgtaggaatcatattagtgctcgtttccgtgtatattctgatagaagcgatttcgtcctttgttgaaggtccaagcatcccgcaatacagcgcattgtttgcggctctgatatcctacgtggctaagcagatcttatatcgttattcgatcaaacaaggggaaaaatggaacagtaaagcgattatagcgattgcatacgatcataaaggcgatatcgttgcctctcttgccgcttttatcggcgtcctattggcgattatcgggaacacacgcggatggtcctatctgttgtacgccgatgcaattgccagtgtcatcgtggcgtacctcatttttaagatttcaatggaattaatcaggccgtctgttgacgttctcatggaaaaaagtgttgatcccgaactgatagaggaatataaagcggttattttggattgccctcaagtcaaacggctcgataaaatccgagcaagagaacacggccactataaattgcttgatgtccggttatctttggatcatgatttgacgattaagcagggacacgatatagcccgggaaatccgaaatgaaatcaaaagacacttttcagatgttgaagaagtgctcatccatgtgaatccttattttgaagaatgaaaaagcagcttgtagagaaaacgatgttttttctacaagcttttttgttttgtgctgtttctttacatattcgtttgatttcactgatccatatgctttctgataaaatgcagcagcgtgtttccttgagcggtcaatatgacgcccttcgcgctgcacttcggacagggcgtcccttctttctcctcgccggttccttcacaatgcggacatgtgagctcaagatcgtcggttgcgatcaccatgaatatccctccttttttgattgtctgtccgtctccagtcactttccatggccatcacctccttaacaacgcaaaaaaaccccgtccatcaaaggacgaggttttcgcggtgccacctttattaacggctgaagagccattctctcaaaaagtacagaaactcagggtttcaatactcctatcttgataacggggaaagaatcccggcaccgcctactgttatttcagcgcagcaattcagaagcccattcggcaccggacggggatcggttcacagcggccaccgactctctgaaccccgcgcgctgatgcgtacttactcttcctcagcattgttcatccgttctatgattttaaaatgtatcatacgctgtcatccggcggaagtcaataacctttcggatcggacagtccgagcatgtcccgcgccatttgcatatgctcctcttgccccgtctgaagcgcgaacttcgccgtttccacagggtaagcggcctgccattctgacacatgctcctgcattttcggccagacgcgcccgccctcagcttcgtagctcttcatcagccgttttgtttctttttctcctaatatcacttgataaaggacaaaatccttggccggatcggcaacctttgcctccgtccaatcgaggagacccgtcacacgctgattttcgccgatcaaaatatgcggaggatgcaagtcgccatggatcagcgcagaaaaatcaggccagtacgagctgtcatttatccacgtttgccatcttttccaaagctgttctgaaaccccgatttctttttttatatgatccattgattccgccgccctttgcctgacgtcatccggttttatgatttcaattccggatctggaggccgcatccgtgtctgccccgtgcagcccggctaatgctgcggcaagcgagccgacaaaaccgtctgaaggcggctcgtgttccatattccagacatactgtttcttatccagatcaattgcggcagccggtattccgtccagtttcggataagcgatcagttccggtgtatgaatccgccaatcggggactgatacagcggcatggctgcggagaaacgcgagaacatcgctttctgcagccgctctttcgataacatcgggacggcgcggctttcggagcacccatgtcacgccgctgtcatcttcagcaaatacgacttggaagtccatacccgtttcatttatgtccgccccttcatattttaaccgtaagccattttcctttgcgatgttcaaaacggattctatttccctttgtttttttgtcatcttgtttccccatttcccttattgactgacacagagcttcgcctttaggcggagaagaaagagatgtgtgaagacgccaaaaagagggcggcataatcgccgccccctcactattactgtcaggttccttattcaggcagacaatcccggtttcctccgcgctcaaggcagagactttgacactatttcattagtgcgaaaaccggaatttgatcagccatcaggatccctccgttccttcttagttaacattattttacacaaaaaccttatatacgtaaaccctatttatcagcttaccggctgcctccgctgacaaattttgatccttcgcgtaaatctttcgcctccaaaaaaaagacgtgaatgaattttttcatattcactttaaccggagaaagcggcacggtttccttggcctgcatttctttcattctcttgctgacagcggggaaatcaaagaatttcgaggcgtaatattcaaatttggggtttgaaaaatcagttgtgcccaatgaagcgaaatggtttaacgaatgaatgacggcccttctgatccgctgttccgaggctttgatttctctgttaacctcggcttgtgccgccgcaggtcccagcttccggatggcggcgtttgtaaacatctgctttaaagacgggatgtttctttccgcctgttcatcctcaaataaatagtgaaggacggccatgaggtcatgcgccccgctttctcccacgatgcctaattccgacaaaagaaattttcctgtttctttgattgatttctcgtgcatcccccccggcccgctttttttcggctcattccgctgaataagacggcttaacgagtgttggatgtcgccgatcgaggtttccagttcaatccgctcttttacttttcgcaaaacggtgacgatctcgattttgttgatcggtttatggataaagtattcgatgccgagagaataagcttctcccaccatttcctttgcctccacctgcgatatcatcactgcttttccgttgtacgccccctgaagatgccgtatcgtctcaatcccgtcccggcccggcatcagcagatcaattaataaaatatcgacttgtttgaaatggagataatgcccttcaatctggcttccgtcctctgcctcaccgacgacttctcctaagtcctcgtcctcgatcatctgttttaaaatggaacggatcgcccggtcatcatcagctataaaaaaacgcatattatgagttcatcctttctgcaatcaaatgcttcaccggcagcttaatcgtaaatatgacgccttttggcttgttatgaaaggaaatgtctccgtcaagttcggttacgatttccttcacgtatgaaagcccgatgcccgttgaaggtgcgccgaattcatcgtatttggacgtaaaaccgggatcataaacgacctctccgattttttccggaatgccgggaccgtcatcttccgcctcaaattcggccatcccccctccgccctgcgcagcgcgaggcggatctcacccctgtcacccatggcttcgacggcattggcggtcaggttatttaagatcgacaggacggtaaagacgtgataatcggggtgttctccttcaatcacgtttttgaattgaatgtctttgcctaaagattcggcgtatttttcattgatgcggataacgaggccgaccagatcggcggcattcatgtaatcccggaatctctcatttgaaatcagcttcgacaggccggcgaatattcgctgattgtcttttttcacttcatgaatttctcccgcaaggcgcagcattcggctcccgagctcccggtcgttcccgctcatttcccgatacagctgataggattctttcgtcacatgctccgtcgttttcagcgtttttttcagatgaatcgtttcttcatataagttagacacaatcatcagcatgtgctcatgctgctttctcgtttgtttttccctgacctgagattcgtgcagcttcatcacgttgaaaaaactcagcacaataaatgtgtgagaaacagcgataaccgcaatatccgccagcttgtccggcatcataatctgcttgccgccggaaaactgaaccgtcatttcaacggcatcggacgccatttcaatgagaaaaccgagaaacccgatcatgagcggccgatcccaaaaaagcctgaccttcagcacataaaacaaacaggcatatgtaaagtaaaaaaagaaactgggatattggctgaaaaaagccgccgtaaatccggcatgctctccccccagcacgccaggccgatccggaatcccacaacggctgcacctgtcaacagccctgacaataccgccggcacatgccgaagcagcagaagaaaaaagaaaaaagccggggcgccgaagctgatccgatatacctcattcagggggtaaaatttcagttcccccgccagcggcacggtgatcagcataagagcgaaaagatagccgtcttttttcagtaaatagtcgagcctgatcataatcacttccttcttctgtctattttgaacaagaccgatacagtccgcaaatttctttagacccgaatggcgggacactccggctgatttataaatctatcggcttattttaagaatgattttgtcgtattttgtatgattctgtagatgtcattatacattaacatggaacacgctatttttgaaaacgttttccaagaccggtttccgcttcggacaggcttgcaatagaggaggaatgttatgaaagatatggtcagagagcgccttgaaaaagaggaactggcttcacttttacaagattgggtcgagcattaccgaccgttttccgtcaatggaaaaagcgcaaattatatacccgccctcggagaaatcaacgactctcagctgggcatttgcatattagagccggatggctcaatgattcatgccggtgaatggaatgtgccgttcacattgcagagcatctcaaaagtcatcagctttattgccgcatgcatgtccagaggcattccttatgtgctcgatcgtgtggacgtggagccgacgggtgatgcgtttaattctatcatccggcttgaaatccataaacccgggaagcccttcaatccgatgatcaatgccggcgccattaccgtcgcctcgctgcttccgggtgaaacggcgcataataaattagaatatctcttttccgtttttgaaaaattaataggaaaacggcctcacattcacgaggaggtcttccgttctgaatggcagaccgcgcatcggaacagagcgctcgcctactatttaaaagaaacgaactttctcgaggcggatgtggaagaaacgcttgaagtgtatttaaagcagtgcgccatggagggtacaaccgaggacatcgctttaatcggattgatacttgcccatgacggctaccatccgatccgacgggaacaggtcattccgaaagatgtcgcgaaactcgccaaagccctgatgctgacgtgcgggatgtacaatgcgtcaggcaaatatgcggctttcgtcggcgtcccggccaaaagcggggtatccggcggcatcatggcattggttcccccaagcgccagaagagagcagccttttcataacggatgcggcatcggcatttacggtccggccattgatgaatacggcaacagcctgaccggcggcatgctgctgaaacatatcgcacaggagtgggagctcagtattttttaatcaaacgaaccaagaggtgattggatgcaggaattccttgaaaatgtaatcggctcggcaaatgattttttatggtcaaaactgttaatcgtactgcttctttctctgggactgttttttacgttcagatcaaagggtctgcaagtccgcatgctgaaggaaatgatccgggttttgaaggaaggcgcggccgcccggacaaaaaacagcatttccccgtttcaggcattttgcatcagtatggcggcgcgtgtcggaacagggaatattaccggaatcgccattgcgatcgcactcggcggtccgggcgctattttctggatgtggattatcgcagtcatcggttcggcttcaagctttgttgaaagcacgctggcccaaatttataaagtaaaagatcaaaacggattccgcggcggcccggcctattacatggaaaaaggcctgaagaaacgctggatgggcgcgctgttcgccgtattaatcacactgtcattcggggttgtttttaattccgttcaatccaatacgatcagcgtcgcctttcaaaacgcgttcggcaccagccggcttacattgggcattattttaatcttggtttttggcggcgtaatcttcggcggcgtcaaacgaattgcgaaaatggcggaatacatcgtagtcgtcttggccgttttatatatcggtgtcgctttctttgtcattctgacgaatatcacccaattgcccggcgttctgtcgctaatcgtaaaaaatgcgttcggcattgatcaggcagcgggcggcgctttaggtgcggccttgatgcaaggtgtaagacgcgggattttctcaaatgaagcgggtatgggaagcgctccgaacgcggcggcgacagctacgacgagccacccggtgaaacaggggctcattcaggcattcggcgtcctgacggatacgctcgtcatttgtacaagcacggcgcttatcattttattttcagacgcttatcaccagccgggactgagcggcatcgcgctttctcaggccgccttgagcgaccatgtcggcgcgtgggcgtcaggtttccttgccgtcttaatgcttttgttcggcttcagcgctctgatgggcaactattattacggagaaaccaatatcggatttttaagccagaacaaaaagtggctgttcatttaccgcatctgcgtgctcggaatggtactgttcggctgtatttccaaagtccagcttgtgtgggatatggctgacttgttcatgggcttaatggtggtcgtgaacttaatcgcaattttccttctgtcgaaaaaagcatttgccgctttgagcgattatgcccggcaaaagaaagccggaaaggaccccgtcttttacagagatgtgctccctgatgacgacgggatcgaatgctgggagtattcagatatcgcgaaaagcgcgaaaggcaaacatatttcctaaacaaaaggtgttcaggcagcgtcctgaacaccttttttccgccggttcattgacaaagagaatagcgtccattaccctttttatatattttcagtaaagtcagaaaggaaggcctatgaatcccattacacaaatattaaatgaatacccggttatgatcatagacggcgcgatggcaaccgagcttgagcggatgggctgtgatttacatgacgatctgtggtcggccaaaattcttttggagagacccgaactgatcaaacaggtgcatgcagaatattttgccgccggcgctgattgcgcgatcaccgccagttatcaatcgacaattgaaggatttgcagcgcgcggcatcccggaaaccgatgcgatacgtctcattcagacatctgttgaacttgccgcacaagcacgcgatgaattttgggcgcatgaagaaaaccgtttacaccggcctaaacctttggtcgccgcttctatcggaccttacggcgcgagcctcgctgacggctctgaatatcgcgggcattacggactgacggaagatgagctgatcagctttcaccgcccccggatgaaagccctcatagaatccggcgccgatcttttggcctgtgagaccattccgtccctgtcagaagcaaaagcgatcacaaggctgctggaggaattccccggcacttatgcatggatcagcttcagcgccaaagacgggcggcatatcagcgaaggcacgcctatttccgaatgcgcggccctgcttgactcctgcagccaaatcgcagcgatcggcatcaactgcacaccgatcgaatatattccgccgctgatagaagaaatcaaacgggcagcatccaaaccgattatcgcctatccgaactccggcgaacaatatgacccggtgacaaaaacctggaaaggcgcagcgtgcgaaaaccatttcggaaaaagcgcgcaaagctggtacgaaaacggcgtgagcctgatcggaggctgctgccggacgaaacccgcggacatccaagccattgccgattgggccaagaccttaaaaacaacttgactaatcggaatagtttgtatattctattcaaaaagccggttcgccggaatctcgtgccgttcgccggcatgagattttttattagaacggccctcgcagaaagttggaaaacaatgaacaacaagaacgagacgaattttcagagaagtatgaaaagcagacacctctttatgctatcactcggaggtgtgatcggaacggggctgtttttaagctctgggtataccattcatcaggcgggtccggcgggcaccattttcgcttaccttttgggcgcgggcatcgtctatcttgtcatgctttgcctcggtgaactgtcagtggccatgccggtgacgggcgcattccacacctatgcgaagacctatatcgggcccgcgacgggctttacggtcgcatggctgtactggctgacgtgggcggtggcgctgggctctgaattcacggcggccgggctcttcatgcagcgctggttcccgcatacttcagtttggatgtggagtgcggtattcgctcttttcatctttttattaaacgccttctccgtgaaattttttgctgaatcggagttttggttctcaagcattaaagtcttagccatcttactgtttattttattgggcggagcggcgatgttcggcctcgtcccgatgaaaagcggtgaggccgcacctatgctgtcgaactttacggatggcggcagcctttttccaaatggctttttcccgatactgatgacgatgctttcagtaaacttcgctttttcagggacggaattgatcggaatcgccgccggggaaagcgccgatccggaaaaaaccgttccgcgcgccattaagaccacagtctggcggctggcgcttttctttatcggaacgatttttgtgctgtcagggatgatctccatcaaggaagccggtgtgattgaaagcccgtttgtcacggtatttgacagagtcggcgtgccttatgcggccgatctgatgaatttcgtcattttaacggcgcttctgtccgcggccaattcagggctgtacgcgtcatcacgtatgctgtggtccctgtctaaagaaggggagcttcatcccgcctttgccaggctgacctctaaaggcattccttttaacgctctgatcttcagtatgatcggcggcattctgtcgttgttgtcaagcgtatttgcagcggatacagtctatcttgttctcgtctccgtctcaggatttgcggtagtggctgtgtggatgagcatcgccgcatcacaatttttgttcagaagacgatttcttaaagaagggcaccagctttcagacttgaaatacaggacgccgggatatccggccgtaccgatagcggcctttctcctatgcctcgcctcctgtatcggcatcgcttttgatccgaaccaggccatcgccctttattgcggaattgtatttatggccgtttgctacaccgcttattacttgaaaaaccggaaaagcagagcccgcgtgcaagccgtaaaatcccaataaccaaaaaaagaaccctgcggcgcaagggttcttttttcatttatacttcaacgacccatctgaacgaatcccgcaccttcccgacttggatgccggcaatcgtttcatagagcttttctgacacttcaccgatcaaaccgttattcagctcaatcgtttctccgtgaatgtgcagcgcgccgaccggcgagatgacggccgcggttcccgtaccgaatacctccgacacctcgcctctcattgcagcctcatagatgtcatcaatggcgacctgttcttccctgacacggatgccccagctttttaacagctctatcacagatgcgcgtgtgatgcccccgagaatgcttccgtttaacgccggcgttacggcctctccgtttatgatgaaaaagatattcatactgcctacctcttcggcatatttcttttccactccgtcgagccaaagcacctgatcataccccagttcttcggctttccgctgagcctgtaagctggccgcataatttccggacgttttgacgtcgcccactccgccggtgacggcgcgcacatactcatcctccacataaatacggatcggtttcagctgatcgccgtaatacgaaccgaccggcgtcaaaacaaccatgaacttgtaacgctttgaaggccggacgcctaaagaaggctcagtcgcaatcacaaacggacggatatataaagaggttcctttttctatcggtatccattcctgctccagctccaccaattgtatcaatgcttccagcgccagcttctcgtcaagaggtggcatgctcatccgccgtaacgatttattcagccgttttatattttggtcaggacggaacatcaacacccgtccgtcttctgacctgtaagccttcagcccttcaaatacggcctgcccgtaatggaaaaccgatgcggaaggatccagatggaccggttcataaggtgtgattctcggatcatgccaccctctcccctcttcgtaatccatgacaaacatgtaatctgtgaagtacttgccaaatcccaatgaagcggaatccggtttttcctttctagctgtgaccttacgtctttcaatcagttgattcaacaaaagcacacctttcttctaattgttcaaattttcagtcttttctgggctgcatgttttttctgtcccgaatcttgtatgcacagatatatgagaatgcagttgaccatatcatatcaaatataccacttataagaggataattatcaaaatttttaatattttcagcggaaatctttctttattcttatgctccttcatttttttcaatgaggactttctgtcatattcaatgattgcgcttacataatgtaaagcaatccttcctttcgcacagtcaatcatgtgacaaatttatggcggacaggaaggtggttgccgcctgcttcacgaattacgtaagaaatgcgcaagtaaaagggggattcgcttgaaaaaatttatcgcattccagattttgatcgctttagccatcggagcattgatcggccatttcttcccggatttcgggatggcgctgcggcctgtaggagacggatttatccgcctgattaaaatgattgtcgtgccgatcgtgttttcgaccattgttatcggagccgccggcagcggcagtatgaaaaaaatgggcagtctcggcatcaaaacgattatttggtttgaagtgattacgacgctcgttctggcgctcggtctgttattggcgaacgtgctgaagccgggagtcggacttaacctctctcatcttgctaaaaaagacattcacgagctttccggctatacggaaaaagtagtcgatctgaaacaaatgcttcttgatattatccccgttaacatcattgacgttatggcgaaaaatgatcttctcgccgtcatttttttcgcgattttattcggtgttgccgcagccggcatcggcaaagcctccgcacctgtcatgagtttcttcgaatccacggcaaatattatgttcaagctgacgcagatggtgatggtcaccgctccgatcggcgttctcgccctgatggccgcctccgtcgggcaattcggaatcgcgcttctgctcccgatgctgaagctgatcggcactgtgtttctcgggctgttcctgatcctcttcgttctgtttccgatcgtggggcttatctttaaaatcaagtactttgaagtgctgaaaatgatttgggatctgtttttgatcgctttctccacgacaagcacagaaaccattctgcctcagctgatggatcggatggagaaatacggctgtccgaagcgggtcgtctcctttgtggttccgtcaggtttatcgcttaactgtgacggttcaagcctctatttatcggtgtcctgtattttcctggcgcaggcgtttcatgtggagatgccgctttctcagcagcttctgatgatgcttgtgctcgtcatgacaagcaaaggcattgccgccgtcccgtcaggctcactcgtcgtgcttctggcgacagcgaatgccgtcggtctccccgcggaaggcgtcgccatcattgccggtgtcgaccgcgtcatggacatggcgcgaaccggtgtcaacgtgcccggccatgcggtcgcctgcatcgtcgtatccaaatgggaaaaagccttcacatataaaggacccgtcacggcagatcagaccgcccggacagaaagtatgtaaacacaaaaaagaccacctcattggtggtcttttctattaatcaatcgccgcatgatcctctttttcaatcaaagcaaggcgttcattgatttcttcctgagtcatttcgtgctctttcacatacatgtttcgttcgttcgtacggcattcgtgactgcagctgcgcatgtatttgtattcattctcaggtgtgcagatcatttttttattacatgccggatttgcgcagttcacataacgctcgcacggctcgcccgtgaaataatcttttccgatgataacgtgctctacgcggttgaccggtacgctgattctttcgtcaaacacatagcactgtccgtcccacagctgcccttgcacttcaggatctttaccgtaagtgacgataccgccgtcaagctgggacacgtcttcaaatccctgcttcagcagccagccggaaaatttctcacagcgtacgccgcctgtgcagtacgtgaggatttttttgccttcaagcatgtctttgtgttcttcaatccagtccggcagctcacggaacgcctcaatatcaggtctgaccgctccgcggaaatgaccgaggtcatactcatagtcgtttctggcgtcgatcacgatcgtgtcaggatcctgcatttgctcataaaagtctttcggtttcaaatgcttgcccgtcgtgacattcggatcaacatcatcttcgagacgaagcgtcaccagctcttttttatggcgcacaaacattttgcggaatgcatggccgtcagcctcgtcaattttaatcggcatgtcggcaaaacgcggatcagctttcagcgcattcatgtattgttccgtctgttcaaccgttccggacaccgtgccgttaatgccttcctcagaaatcaaaatacggcctaacagaccgagctccttacaaaacttcaaatgctgagccgtgaactcttcaggctcatcaatctttacatatttataataaagtaaaactctatattgtttttccatgatttatacaccctgttcaattatattaatgatcacgcacactatactatatcatacaggaaaacgggcgaaagatgaacatttccgtccgtactctttcttccagtcacgcttcgccttttaaaacctgctgaaaataaaaccgatacgtattgcgcaaaaaggtctcaagcgaaaggccggccgcggtctgatacttgccgataataaacggaaaacggtcacggccttttgcccgcagaagatccgcgctgtcttcagccagttctgagatgagcgcctcaacgacaggccggcatgcatcccgcaccgcttcaagaatttgctgatcgcctgtatgccgatactgttcgatcagctttcccaaatccttttcttccataaagttcacttccttacaccatataaaaaagaggagcagcttttataaagcggacgcctcctcctgtgactccgcataaccgatgatctgaccgacctgtaattcacggccttcagtcaggttatccgaaggggtaaacatatctttctcgaatactaaaataacggtcgatccaaatgaaaaatagccaagctcttcccccgtctcaagccggtttccggtgtttgtctgaacgatcgagttaatattcatcgcacctaccggaatcatgagcatctgctgatcagcacgggtcagctcgtacacataacggtaattttttgagagcacatctttcccgtactttaaccccatcgtattaacgggataggagcgtttccccagctcggccagctttttatacgtgcagctgacgggagaatggaagcggtggtaatgtctcgggctcaggtaaagcacggcaaaacacccgccgttatacttgtgatcggcgcttttaaaccccgtcagttcggcgaacgaataatccttcccttttaccatgaaagtttgattgggattaatcatgcccaccgtctgaacgacgccgtccaccgggctgacgatggcgttcttctcttttgccacggggcggagattcaaattaatatcacgaatgaaaaatgacgccagtgaatcaaagtcagaagccgtgcgttccgtttcattccagttaatgcgatagtgtttggaaaacagcggaatcatcggcttgctcagtttcgattcacagaagtttttaatgagataagacgtcaatcgattattagtcagttcaatcaatgaacggtaaagaactttagcggcagtattaaacattgattactcctatgaattttcctatagtaataaaaataaaacaccataaaaacgctccgatggcggcgaagcataagtaggttttgaattccattctgccgattccggaaaagtagcaggtcacgtgtctgatgccggggatgaaataacctaaaataatggtgtacggcccgtacttcttcatccacctgtctactttctccatcctcttttccttcaggccgacccatttcccgaacttattaataaacggccggccggcttttctgccgatgaagtagctgataatcatcccaaggagcgctccgataaagctgatcagaatggagagcccgtaattcagcacgtttaaatgagcgaagtagcccacaagcgtcatcatgacttcatccggaataggcaatccgataataccgagtgtcagcataagaaaaatcgcgatatatccgtaatcggatattaattgctgaactaattccatcttctgctctccaggttttcaggcgcctgttttttaaagtgcggaaatttaatgttgctgaccattaaataaccgagcgcgatcgttcccgcccccagaagaaaagcgttattgataaagctcaaaatgacaagacacatacccgcaaacggaatcggcatcccgataaacgtcggcagcttgctttgttcaatattaaatctggaaagacggatcatcccgcagatgctgtaggaaagcgcgattaaaattccgatgaacggaagcgtatatagtgaaacactgtaagcgagcatggacggcgctacgccgaacgtcacgagatcagcaaaagagtcaagctcccttcccatctccgataccgcgttcagcttacgggcggccaaaccgtcaaagaaatcaagaaacatcccggtgaaaataaagatcaccgcagagtgtatattatgatacaaaagggaatgaatcgataagagcccgcaaataaaatttccaattgtaatcatactaggtatataattcacagtttacacaaacctccaattaaaaccatatcaaatcggactgcgtatgcataaagactccattttacggaaacataaaatgaaatcctttcaatgctatcattcaaattcttttattatacagcatttggtgttatttgaacaatctaatctggtgatttttgttttttcgccgttcatattaaggtaagcaatcatggtttcctctattccggattaccctgcttaaatattccatgctgcgatccggattgtccgttcttgatgaatgaaaagccgtatgatgtattgttatttccttctccgtgaaatgagaacattacatataacgattgcggacataaaaagtttcaagaattaaaaaaccggcacaaaacggcctcatacattatctcacaaccccgttttccagtatatagtctgtccaaacaaaaaaggcgccttaccattacggtaaaaacgccttttaagatcattttatgtaattgataaatgactgagtgcttcggccgctctttctctggcctcttcaacggtctcggctgcagaaagcgcaaccgccatacggcgtccgactttcgtgacgggtttaccgaatacgcggacctgagtgctttttaccgccaaagctttctccaaaccttcaaccgcataatcagcaagctctttgggcgccttcagcggacggcttgcccccggcgacagctgaatgatttccggaatcgggaatcccaagaccgcgcggacatgcagcgcaaactctgacaaattttgcgtcacaagcgttacgagccccgtatcatgcggacggggagacacctcgctgaaatatactttatcttcagtaaggaaaagctccaccccgaacaaaccgtatccgccgagctcatccgttatgcttttcgcaatgtgtttcgcctcttcaatctgctgttccgtcatatgatgaggctgccatgattcaatatagtcaccgtctttttgttcatgtccgatcggcgcgcaaaaggacgtaccgttcgccgcgcgcactgtcagaagagtgatttctgattcaaacggaatgaattcctcaacgatgacccggccgtttttcacccggccgccttccattgccatgtcccagcagcttttcagcccggaagccgagcggcacacgctttgcccttttccggaagagctcatcagcggctttaccacgcacggaaagccgattgtttccgccgcttctttaaattcttcgtatgtattcgcgaattcatagccggcagtcggaagatgaagcgtctctgctgcaagccgtctgatgccttcacggtccatcgtcagctttgccgcacgcgcattcggaatgacgtgaaacccttcttcctcgagcttcagcagctcatccgtcgcaatggcttccacttccggcacgattaagtccggtttttctttctcaatgacttctctgacctgcgctttatcaagcatatcaatcacatagcttttgtgtgcggcctgcatggcgggagcatgctcatagctgtcaacggctacagtgacaaccccgagccgctgcgcttcaatgacgacttctttccccagctcgcctgatcctaataacaacatcttcttcgcctgatacatgtcctttggcccctccctttctataccccactcattataacggaaatattcaaaaaataaagacaagacagattacaagctctatcctgtcttttgtgctgattcgagcgattcaatcgccgctgacacgtccttcccgcaatattgccccattaagcataacgattcttccgcccggcaggcgtgagaagcgatgcggcgctttgcttcctcatggttgtcaaggatgccgagagcacagagactgacggggaaaccgagccggcggtaaaacggaagcagctcttcaatctcatgtctccgattctcaagcgcgagctgcaccaatatgccgtaagcaaccttctggccgtgcagcacctgatgtgtctcctgaagaaaactgaggccgttgtggaccgcatgcgcccctgccatcctgcacaaacggccgccatacccgccgaccgttctcgcaagcataatgatcgtttccgccgtatggatgaacggcacggacagctcgcctttctccatgcttacgacggcggcttcactgtaacgcaataacagattacgcatatattccgcctgtctcagccccgcctgcgccatcagaggcggcgcttcctccgtatttctgatgaccgcctcggcctcataccatttcgccagcgtatcaccgatcccgcttttcatatattcaatgggagaggaaagcaaaaacagcggatcaacaagcgtcaaatagcttgaacgcttgtgataatcaactctgataaaattgccgctctcatcatatatgacactcaacggcgtacttgccgcacacgtccccgcaatggaaggaagcatcacagcctcaatatcaagccggtctgccgccgcttttgccaaatccaaaatcgtgccgcctccgataccgatgatcacatccgcgtcttccgcctgcccgcagaccttacgcaccgcctcaggtgaacagtatcctttgtgctgaatcacatcccaggaagaaccgccgccgtaatcggagaacgcctgataggatttgattccggtcacaataacgggttttctgaatgtctccagcagccccggaagttcttttgcgattccttccttgcatatgtactgattcgggccgcttcggacgatatcttcaggcttcattcgaatctctcctttggctggaatttatacatattttctcacttgtcagaaaatacatcaaccggaggtgcgtcagcgcttcgcttcctccgcctccaaaaacagctcatcaagccgctccaaagcttctgccttttcaaaactgctgaaccacagatcatcataagaatcaaggatgcggtaatgatgggaaatcaaatgctgctgcaagcggaactcgccttttttctcgatggctttccaccacaccttgccgcccatcgtcttccccttcggcctgtcaattgtgcggtgagcaaccgtttcaatgacctccagcggatcatctcctaatacggattgcagtgtttcacttgatctgaaaagcgcgcaaaccgccacaacgtgcggccattccgcaagcgcccgccctttctcaatctgcaccagcgactttttagaaaggccgatcacatccgccattttctcctgtgtgtagcctctctccgaccggattttcttcagctggactgagacaagctcagtcatataatcttgatccatctcaacctccatttttatcaatatagccattttacaccgcggcacgccttttttatatcagaacattttcaaacaaatcaaaaggacccgggatcggcttttcattgaaacgatgtacctttccgcataatccagaatgatgcggtgaatacaaacgtacgcccgaagagacagatgcggtctccctggcggttgagctccggagaaaataaaaagctgccgcagctgcggcagctaaaacattataagctgaaaatcaaaattatgaagcgaatacaatccaactcgcactataattgacacgttttttcgaaccttgattgaccattttaaatctgtatgaatctcctttttttaacaaaggtgtttcaaaataagtcgttccatttttctttgcattggcggttttgattgttttccaggcacctttgccgttgacttgcttttgaacgtatattttatacgtgcccttccctttactgttggatttaaaagtcacggctctcaagctgtacttttttgtcgtcttagtgaatttaggatgatatgtattgatcacatagttagtgaaatacccgcttttataagtatgaagccagtctttagcctctgctttttgcggagaagaaaaacccataaaaccaattccgctgattaaaagagtaaaaataatgatgagcgacttaaaaatctttttgcttttcatcgagaaaatccttccttcctgtaactatttaccctatttatgttaatgacaatatagctaatcataaatccgtccaactaaccattttgactgcagggagagatgaaaacagccctgaaaatgactatatgactactacttatgattcttgttatttttgattaagtgataaagttactttaaagcgctatccattttgctgtttttgtatcaattgtcatagagagatcttttcctatcaatgcctctctatcggcgtttgtatgatggggctgtcctcggacaaactcctgcacccatgacaaactgtcatacgtttgccacctatgaatgaacgcacactacacgtaatggagggattgcaatggacgaaatggtcctggaaacacaacaatggctgaatgagacgtacaaaggcagacacgggtacaacaaggtgccggaaaacggaaaaacaggctgggataccatttacggtctgacacgggcgcttcaaattgagcttggtatttcagaaccagccgataacttcggaccgacgacacaaagattgtttaaaccgttgaaaaagcaggctcccgattctaagccgacaaacatgaattacattctgcagggggcgctgtggtgtaaagggtttaacccgggcggattttctggcgttttctatgaaaataccgaaagcgctgtaaaagagtttcaaaaagcggccggacttactaagcaagacggcattgtcacggcactcattatgaaggctttgctggatatgagcgcttttcggttagtagcgggaggcgacaaaagaatccgccaaatccagcagaacctgaaccgggattacaatgactacatcggcttgatgccttgtgacggcttatatgcccgcgatacaaacaaggccctcatctatgctctgcaaaaagaagaaggcatgagcacaagcgtcgccaatggatttttcgggaacggaacgaccagcttatgtcctaccttgactcccggcgattcacggacaggctttgttttgattgttcaatacgcgctttactgtaatgggaaatcatttgaccccggtgaattcgacggaaaatacggcgtcggagttgtatcggcagtgaaagctttccaagaatttatgtgcctgccgcagacaggttatgcggacatgccgacgattaaagctttattatcaagctcaggcgacacaacgcgggctgcttcagcttgtgacaccgctgccattttgacggcagatacggctaaaactttgcgtgagaatggctataagatcgtgggaagatatctgaccgggaatgtgcggactagcagcggactgacatcgaaagcgttaacgtcaaaagaactttccgcgattttcaatgccggcttaagcgtgtttccgatttatcaggacggcggctatgaatcttcttattttgtaaaagaccaaggaacgagagatgcgtacagcgctgcatcagccgcccgaagattaggttttccgtcaggaacgaccatttactttgccgtcgattttgatgcgtatgattatgaagtcacggataaaatcatcccttacttccaagaaatcaagtcagcttttatgaaaatgcaggcgttctcaactgcgccgaaatatgaaatcggggtatacgggccgagaaacatttgtatccggacgtcagaagcaggtctgaccaaatatagctttacggctaacatgtcgaccggattcagcggcaacctcggatacccgatgccgaaaaactgggcttttgatcaattttatgaaggcacgatcggaagcggagcgggaaaagtcgccattgacaaagacggatactccggaaaagactcgggtgcaagcagcgtccatccgccttctgatcccgtgtatgatgcaagactgcgcacactgacggacattttaacaaccattcctgctttagaaaatatatcgaatcttgcgaatgccatgtttgaattcgacaagacagaaaccatttatgcatcacctgaaatggatattcttttatctacttcacttttggcaacagtgccaagcgaaggttctcccaacacagttaccattacaaatggcaaaccgggagcttatattaccggtctgatgggagattcacaagtctcttttacagcatcacaaattgattcgtatcaaaacctgcttaacagtctgagcttgtcagtgcgcaacggttatttagaagtgtatgtcaatccggctgcgggatcgctgaatattcaatttaaaatttatacacctgatattccggtcggtgacagtgctactactggactaacaactaccattacatttaaaataaaacaaaagagcttcagattgccggattccgaagaggtgtactctccggattgggattctgtcgtgaataccatggctattgcaggcgcaggaattattgttattgtagggatcggtgctttagtcgttttagcacctgaattaggaggagctgcagccttgttcagcacagttttatcactatttctataattgaacaggcagctccttgctccaggaatgctcaatgagtattcttggagttattttttaaggaggattcgtatgaagattgatatgcagacatacaaggacaccgttcaaaaaatagaaaatgatttgattccgcgaagtcaaaatgacaaagaactgcttacatatttaatgaaacaagattcgctcacactgaatcaaatgaaaatgtgtttcactgaaccgctcctcaccttccaacatactgtcaaaatcgtatgtacagtcacattcatcacgttatatatcttttttttcagcactcattttaatgatttgattgaaatggctctgcagatggtttttggcctggccggccttgtttggatttttgctgtatttccgttttcaaggaaaatccaagtgtctgaccgtttcagacaaaaatctgaaaacacccgtatcaccggaatgatagactttgtcctcgaacaacgatacaaagacatgatcagttaaaaacccctctgcttaaggggtttttttatgatgcaatcccttcaccccccttatcaaaaaaggctcttcccctttggaaataaccggaacacccaatttcgttttcaatataatgaggtagtggatctgcaaagaaagaagggcgacatgatgggtatcattaatggcaaaatgttcattgaccgattaaatcagctaggaaatgagatttggcttgatggtgaaaagatcgagggacagatttctgaacatcccgcatttaagggccttctggaaacgaagcgctctctttatgatttgcaaacgaaaccggacatgaaagatcaaatgacttacagtcttcccggtaaaaaagaacgggccgggctttcatacctgcagccgaaaacgaaagaagacgtaaaaagaagaagaaacatgttcgaacattgggccagacacacgcacggaatgatgggacgaagcccggattatatgaataccgtgctgatgagcttcgcctcctctgccgcgcttttgaaagaccgtgatcaatgttttccggaacatgttcaagcgctgtacgaacgcgctgccgcacaggatctttcttttacgcacacgtttatcacccctcaggtgaatcgttcacaaatgggtgtaaacgtatcgccgacacctatctcggcaaaagtcgtcgataaaaatgaaaaaggccttatcatacacggcgcgcggattttagccacacaaggcggcctgacggatgaagtgctcgtggtttctctgcctaagatgtattttgaatcggatgaagcgttcgctttttcaatcccttccaatacaaaaggagtaaaattcatctgcagggaatctttcgtactcggaaaatcatcgtttgattatccgctcagctcaagatatgaagaaatggattctatcgttgtatttgatcacgttttggtcccttgggaacgcgtatttttttataataattacgaggcggcttttgattttaatatgaaaagctcttttaacgccttcgcatttcatcaagttatcacgagacaaattgtaaagacggagtttctcctgggcctcgcccaaacgcttgtcgatgcgatagatgtgggggaatatcagcatattcaggccaagatggctgagatcatcaccggtctggaaacgatgaaagcccttttggaaaagtcggagaatgatgcggaaacagacgaatggggttatatgcgtccgagtgtcactccgcttcgcgtggtcagcgcgattttccctgacatctacccgcgcttcacggaaatcatccagctgatcggggcaagcggaatggtgactttgccgactgaaaaagcgttccgttccgacatcagaggagaccttgaccaatatttacaggcggccgaattgaacgctgaggaccgggtaaaagtgttccgcctcgcatgggatttgaccatgagcccctttggaacaagacagacacaatatgagcggtacttcttcggtgaccccgtccgcttagccagccatctgtacagaagctatccgaaagaagaacagaccgcggtcatcaaggaattcctgcacattcataaataaaacaaagcagagaacgcatctctgcttttgatagctggatcggctgccgccgatcctattttttgttttggctgatcaccaccatcgtaatatgcgataacgcgaaagagacgagcgtgtacacgacggcccacccgataaacgagaaattcaatatggtaaaggtgcatataaggcaaacggctaaagcggcagccggcataatgaacgcgtttttaaacaggtacgttccggcgactgacaggatgatgatacaaagcggcagaacaccgaacgcaaaatccaattcatcaatcaacagatgcactcccttcgcttttcttagttcggcctaacacatcttatgcctgagtacaaaatcgagtacatcaaatctttcgcgctccggctgatattccctccggttatttattcaaaaaaatgaaaactttccttaaagcgtttacattcacgccagactgtgataatttaagaaagcgctatcatatacaagttaatgatttttggatggagatgaggagaaccaggaaaccgcgccctttcataagggtgatttctggttctttttgtcattttcaaggaaaggagtcatacatacatcatgatagacgttcagcaaaggggaggatatgatgtttcaattgttcaagccggctccgcatattgagagattggatgattcaaagacggatgcggcctataaacggctcaggctgcaggtatttttggggattttcatcgggtatgccgggtattatttacttcgcaaaaactttgccttcgctattccttattttcaggaacaagggttttcaaaaggggaacttggcttggtgcttgcggccgtatcaatcgcttacggcttcagcaaatttattatggggatggtgtctgaccgctgcaacccgaggtatttccttgcgacaggtctgtttttgtcaggtgtcgtcaacattttatttgtttccatgccatgggtcacgtcaagcgtgacgattatgtttatttttatgtttattaacggatggtttcaagggatgggctggccgccttgcggacggacgatggctcattggttttccatcagtgaacgcggaacgaaaatgtcgatatggaatgtcgcccataacataggcggaggtattctcgccccgctcgtgactctcggcatcgccatgtttgttacttggaaaagcgtatttttctttccggcgattatcgccatcgtcatttcatttgtgattgttcttctcgttcgggacacgccgcaatcctgcgggcttccgccgattgaagaataccggaatgactatccgaaacatgcgttcaaagaccaggaaaaagagatgacgaccaaagaaattcttttcaaatacgtgctgaataataaatttctgtggtatatcgcatttgccaatgtctttgtttatttcgtgcggtacggtgtcgttgactgggcgccgacttatttgacggaagcgaaagggttctctcctgaagattccagatggtcttatttcctttatgaatatgcgggaattccgggaacgattttgtgcggctggatcagcgaccgatttttcaaaagccgccgcgcaccggccggcgtgctgttcatggccggcgtatttatcgctgtattggtctactggcttaaccctgccggtcatccgctcatcgataatatcgcgctgatcagcatcggattcttaatctatgggcctgtcatgctgatcggacttcaggccattgaccttgcgcctaaaaaagcggcgggaacggcagccggcttaaccgggtttttcggctacatcggaggctctgctttcgccaacgccatcatgggttatgtcgtagaccgctttgactggaacggcggctttatcatgcttatctcctcatgcgtgctgtccatcgtcttcttggctatgacgtggaatacaggcaagcgggcggagcatgtgtaagaaaacaacataaaagattaatatttttgcagtacagcatttacaacgattttctacactagagacagatattgatttttaagggggaagaaaacatgcggaaacataagttgtttgctttggtattgctttcattcggtttattgtcattcatcgtcacgcctgtatcggcggcgggaaaaggaaacctcttgtctcctgacagaattttaaccattgcccatcgcggtgcttcggggtatgtcccggagcacacgatcctttcttatgaaactgcgcaaaaaatgaaggctgactatattgagctggatttacaaatgacaaaagacggcaagctgatcgtcatgcatgatgaaaaactggaccgcaccacaaacggacaaggctgggtgaaggatcatacattagcagagattcaaaagctcgacgccggttcttggttcaataaggcctatccggaaaaagcaaaaccgcaatacgccggacttcgcgttcccacacttgatgacgtgttaaaacggttcggcagacatgcaaactattatattgaaacaaaggcgcccgaaacatatccgggtatggaagaaaaactgatcgcctcactgaaaaaatacaaattggcaggtaagcatgcgaaacttggacaagttatcattcagtctttcagcagggagagccttctgaaaatcaaacagctcgatccgaaacttcccgccgtccaattgcttgaagcggaacagatgacctcaatgactgacgcagatttaacagacatcaaaacatatgccgtcggaatcggaccggattacaaagcgctgaacgctcaaaatgtccgaaacattcgcagccacggcctactgcttcacccttacaccgtgaacagcgagacggacatgcgccgtctgctgaattggggcgtaaccggtgtgttcaccaactatgcggatatatttcaaaaggttaaaaaagaatataaatcataaagccagcatgggttcggagatgatgccgaacccatgtttttttgcctgatcaaaaaaccttgcgggaacgttaccgcaaggtttttatcaatcattattcttttccggcagcggcttccgcctgcccgccttttaattgatcgttgattgctttggcgtctttcaaatactcagtcttgaatccgctcttcagcgcccacgcatagaaggcaagggcaacgattgcgatcagccccatatcccatccgtacggaatgatgttcagaccgccgaatttttcacttccgagccatgaaatgaccatcatgctgagcagatagacaaccatccaaacgccgcctttaaagtttctgcggaatcctttccacttcgctttcgcttggtagtagaaataaatcggaaggccgatcaaaatgataaacagcacctgccctgttaacggccagcgcgcccaatacagcacgagagacgcgaacacgaagccgagcggtgcaaccacgctgagtcctttcagacggagaggcctgtacaaatccgccgccgtcctccgcagcgtcattaccgtcacgggacccgtgatataagaaatcagcgtcgctacggaaatgatttcagcaagcacgccccatcctctgaataaaaacagaaagataaacgatacgatcaggttgaaaatcatcgcttggcgcggcacgccgtacagcggatgaagctttccgaaaatgctcggcatatatttatttttttccatgccgtaaatcatgcgtgacgtcgtagcggtatatgtgatacccgttcccgacggagatacgaacgcatccgcataaagaataatgacaagccagttgatattcaatgcgatcgccaaatcggcaaatggagagttaaagttcaggtgactccagccgtgaacgatcatggaaggttcaaccgcaccgataaatgcgatttgcaataggacgtaaatgacggttgcgaccagcagcgaaccgacaaccgcaatcggaatcgatttgccgggattttttgcttctccggccatgttaatcgggctttgaaacccgttaaacgcaaatacgatacctgatgtggccaccgccgtcagcacgctcgcccagccgttcggcgcaatgcttgaaccggatgtgaagtttccgccgtgaaaaccggtaaacagcagcgctccgattgtcagccccggaataataattttaaagatggtaatcaatgaattcgcttttgaaaacaagttaactgtccaataattcagtaaaaagtaaataatcagcaatacggatgcgaagccgagccctctcccgtaagtgtgccgttgtgaacgagattgcttgtccactttgcccagtcccacggccatgagctcatatattgaacagacgcaaccgcctccaccggaataacggaaacaatcgcaatccagtttgcccatcctgcgataaatccaataaatgatccatgagaatattgagtatattttaccattcccccggcttccgggaacattgaacccagttcactgtaagaaagtgcgataaacaaaattacgatcataccgataatccaggaaataattgcggcaggtcccgcaatctgagccgcccgccacgccccgaataaccaaccggagccaatcatcgacccaagtccgaccatcatgagtgcaaacgttcccattctgcgatgtaattgattcataaagttaacacctttcaattaaaatatgactccagcgctatcatatatttataatattattctgaaaatagttttgtcaatctttatcgcattaaagcggcaagccaaaattaaccttccgatgtttaaacagccgttaagcgggaataactactgcaagccataaatagaaaggagtttttatcgtgaaacaaaaactgctcatttcaggacttgccgtgtcgactgtcggagtgacttcctacctgctcaaagataaatcaaaccgccaaaaggtgatgaactttatccgcaatatgaaaacatcgctctccgggaagcaggatattgaatcattccccgtcaacaaagcaggcaacccgcatcccgaagatattgaagataacaaaatggtatccgaaggctccatgtacccggttcaatattatgatgacaagaagaaataatctgtgcccgggctgcccggccgtatcaaacggcggcagctttttttatgcagacggcgttttatagatccgccaatattggcgcgatcctttctcccgcacggtaatgcccagtttggatatttccgctttcagctctttcgcatcagccttttcctcctctttcagcgccttttctctcgcttttaaaagagcatttgccccgggctccaaatccggcgtgtccggcacccaccgtttgtattcttctttaaaaggatcttccgtccccagccagacatacccatgcgcgcgaaacgcatcagccgctttttcaaccgccggctcaagcttctcccgaaaaagctcctgtccttcagtgcctaataaaacaagatacttcccatccgtaaacacaccggaaatgctgtctttcgaaaacacgctttcttcattatatatggttaaggacaccccgctgtccgtcacgactgccacaagactttctttaaaagctgcccgcgtcagccacactcccccaattaagccgataacggcggttgcagccgcagccttccatccgtgaaaggaagcgattatttccagcggcccgtgaaaaggcagccaatccaatgttacggcccacttcgtaatgaccggcagaaaccatccgatgaccagccccaataatggcggcaccagataaaccaaagctttttcaaccgatgacaactcaagaaccgtctgtttttttatttcgttcatgtttctcctccgtctgtgtttttcacaactatccattatacaaagggttggatgattctgtaaactggttccgaaacaataaaaagcctcccggccgccgggaggctctttaaaatagaagctcatatacttcattcaattccatcgtgcgcttctcatcctgctcgttctcagcatatttgatttccttttcaagcacctgattcagcgcatccatttccagatcatttagatctttcacgaactcgccctcatttgcataatgcttcacctgaagctttttataaaccccccggcacacatcatgctccaagtggttcgaaagcgactcgcgcaaatatccgagtgtcctgtccatcatgtaagccctcccttttctttaggaatagcttcccggaaagagagaaaaactatacatgaaagcaccgggcggctgttttaactctgtacctgaatggagaaaaatccgctgcttaacggcgtgtacggcccgttcagccccgttgcggagaaagagaacgttcctgaactgacataagaaagaggaacgctgtaatatttaatatagcctgtaacgatattgccgtttttcgtatattcatcttccagcgcttttgacgtaagatttgtaatattcgttccgttgttaaacgcctggatcgtattattgttcggatacccttggaaatatacggctaaataacccgttgtccccttcatcggttttgatgcgctgatttggttcggaccgatattttcccattggtaattctgaccgtcagacgtcacaccgataatacggatttgtgttaaagcaggagccggcgccgcagacgctgacggaacccacaacccgctcacaagcaacaaagcagcggcggccgcggcaaatagcataacgagtctctttttcatgtttcttcctccttgtggttcaaatttataattatgttaaatattataagtttcattttatcagagaaatcaatagatagacagaatcaatcagtcaaattggtgaactttttatataaaaaagctatctcctaaaggagatagcttatataacattatttctttccacactccaaaattgtgtatttactcggagtctgaattacatttaatagtgttaatccggctttttcaatcaattgttcaaactcggttatctttctgactctgccgcctgcagagcatactaaaaataataaatcacgaaaagcttcttcaggggacagcctgtctgcttcaggcacattttcaactataatcagcttggaatgatcagacatggcaccggctatattttcaagaatagcaaccacatgctcatcatcccaatcgtttaacactttgcttatcacatacaagtctccgccggaaggaatttcctcaaacatactcccttccgtaaactgacagcgttcgctcatctctgaagatgctaaatgcttttttgcactttgtatcgtttttggaagatcaaacaatatcccctttgatttaggagccacacctaaaatgcctgttattaactggcccattcctcccgcgacgtctacgataacatcaaacttttcaaatgagtaagctttcaatatggatggcagactcatttttgaataaatctccatcgccttatccattgtttttaagtaatcttgatcaagactattattctcataccatttatcaccataaatggcttcaaaagcggatttgccggttttgatactataatccattttaaacatagactgcactactgtttcatgcagcagatattctaccaaaggctcaatggattttgctttcccaggcatcaaagtggcaccatactctgttacatcataatagccattttgagcttgggcgaccaaaccgacggattccagcgctcttaagagcctgaataaggcagaggggttcaattcaagggcttcagctatcgcttccgctgaagctggtccattttgaaaggcggaaaatacatccaattctaccgctgttttaactgccagggaaaaccccagccctgaaaccatttgcatgactgcggcctgaggatatttcttcggtacttgtttatcttgctgaactgaattggtcatttacgttaacctccgattaattaaatggtttctgctgcttttttgatataacgcatatactgattgagcagattttctacagtactcttatagtactgattttgattatattcaattccaatgctcaattttttctctcttaccaacacaataaacttaaacttgtaattccaaatttcatcttcacttatatcattcccggttgaaagcggagataccgtaaagctttctgtgtgcagttcattatcaaattcgcccatataattaaatgaaatgtctggttttgatttctcttttatatcttgttttaaatatcttaaaataccatatcctatcccttgatcaggaatattggctaaggtcgagttaacattatctaaactcgaaccgatatgatcagaatcggagacctccaaagccaccggatagattgcagaaaatctgcctactgttctgtagatattaagcttctcactctgatgagtgcggccatggttgcctaagtgcacgagagatgtattactgcctgtttgatgttttactgtcaaacctaaagctgtgagcaaaacagtctcaatagtgaaatgatcttgtccttgaatcgcattcattatattttcagtttcccgaacattaaactgcctgtacacttgtctgttatctttgactttggcaatttgcccctgaatatcaaccggaatagacggagcataaacattttcgattttcgtccaatactctttctcaaacaacagccgttcactttcagcatatttatagagataatcagaccattttaaatacgaatcggttttatttggtaatacaatgtcttcgttacttttaacttgctgatatgctgtattaaaatcttcaagcagtattctccaagacatatgatcaatgatcatttggtgaatgacgattaacagatgttccccatctgcttccttaatgagtgccaatttaacaagcgggccgtgagtcagatccatactggcttgtatttgatttattttcatttttaaaactgattgcggcatgtttattgcattgatcagatgaaagtcaaacaagtcgccgtccgtcaggcctctgattacctgtaccattctatcgcctttacgtttgaatactgttctcagactgtcatgatgctgaataatccgggtgaaaatgtcttttacaatatcttcgccaaacccggcttccctgtataacataaaagaaagattccgatggtgcagagtatcattatggctttcagccagccagcattgaattggcacaagacgggcttctcccgttatcacactgttatcagatgccgctgttatataactgactttattcgaaactccttcgattgtctggtaatgaaagatgtctttcacttccagcctaagattgaatttttccattctgaccgctgcttgtatggctttaattgaatctccgcctaaaacgaaaaagttatcttttatactgattttagaaacttcaagaatgtcggaccaaacctcactgacgattcgttcaatctcgtttctcggagcaataaagtgatgcagctcggcattattttcagctggaagcggcaaacgttttacatcagtcttcccattgttcgtcaacggaattttatctatgccaataatgactgtcgggatcatatattccggcagatattccaataagtattcttttagctgagaaggcggctgcgtatctttacatactgtataggcatatatctgatcattgtgagcaatcgcaaccgcttcttgaacattgcggtgagacagcagtctgtttataatctcatccagttcaattctaaatcctctgatttttacttgtcggtcgattcttccggcaaattctatattcccatcctcattccacttgcctaaatctccggttttatacattttctcaccagaatgaacaagatccgggataaatttagccttggttagttcttcacgattgcaatagcctcgtccaactccttcccctccgatgtataactctccgataactcccggcggcacaggcttctgctgtttatctagtatgtagatagaacagttttttatcggtgtgccgatagggattctctttatattggaaatattatcctggtttatcgtataagctgcagcatcaacacagcattccgtcggtccatatacatttgttatataaggacggtcattctttttaaatactttatagaaacgctttacttcttcaggtttaagcacttcgccgcctataataaaatgttttacacctatacggccacactgcggagactcagagagcaggctgagataggctggtgttccatcagaaatagttattttattttggatatagaattcagcaagtttcgtgatatcatgcctggcttcttcagagacgatgtaaagagagtgtcctaaaagcagtgcagaaaaaatctgtttgacagaagcgtcaaaagaaaagggtgccaacaacgctacattctgctgcccgccatgtttgcagtagatacgttcatgcagggcttctgttaaattcgctatacttttatgttcgatcatcacaccttttgggtgtcccgttgatccagaagtgtagatgatataggcaaggctatgcccttccgttcctcctttaacattcctcccgtcgtctggaactgtttccaattcattcagacaaacactttctactccgtacctttgaccatgattgttgcgatccgtcagtaacaaacgggccccgctgtctttgagcatatactcaactctttcttgcggatatgatggatcaattggcagataagctgctcctgcttttaaaattcccattattccgatgataaaatcagtggttcggtctgcagctatgcctactgcttcattctttttgacacctttttgaatgagtgctcttccaagccggtttgcatttttgttcagctcactataagttaagcttccgtcttgtgcagacacagctatttgattcggcgttgcttccgcctgcttctcaaaaagctcacagatagatgcatctgtgcctctgcttctcagtgatcttccactgtaactcaatatttcgcgtcgttcattttcttctaaaatgttaatctccccgattagtccatcttgactttcaacaatatgattgaggatcattaagaatcgctgtgagaatttttctacagttgtgcgcttaaacaagtttgatgaataagtgaactcaaacttgatatcctcttttgaaggaaatgcttgaagcagaagatcaaatttggctgttttgttttcataaagatacggcttatatttcagcccatttacttcaattgccggattatccatcagctgaaggacaaacataacgttgaaaagagcattctggtttatatccctctcaaggttcaaatggtctacaagctcttcaaaaggataatcttgattttcataagctagaagcgcattatccctaacggcttcaagcagttctttgaatgttttgtcggcagatggtttatttctcagtgccagcgtatttacaaacattcctatcatgttttctaattctttatgctttcttccggctacaggtgtgccgataataatatcttcttgaccagtaagtttatggagaagcacattaaatgaagccattaaagtcatgaaaagggtgactttttgttttgcgtttaattctgttaacttggcagtcagctctcttcctgcataaaaatagattcgttcaccttgatcatctcgttcggcttctcttgaaaaatctgcgggcagattgagaacgggaatttctcctttaaactcatttaaccaaaaatctttttgttttttcatttcttcagtatgaaataattcattttgccatatcgcaaaatccttaaattgaatgttcaatgacggcagttcgttgccttcgtataaatttatcaattccctttggaagatcgggatagacgccccatccgctataatatgctgtaaatctatcattaaaagatgtttttgatgactaatctcggctaatcctgcacgcagtaaaggagccttttctacatcaaacgggcggacaaaattagacataaggctctctaattcttcttcggaggtcttgattctatccattttaaatcggacgtctttttctatgatttgcacaagctgcccgtcccttaaacctatggacgttcttaaaacctcatgcctgattattaattttttaaacgcatcttctaaacgtttatcgtccaactctccttcaatcattaaaaagaacgggatattataagaagtgctgtttttatttaattgatctagaataaaaattcttttctgtgcagatgaggcctcataccactctaaatcgcctgctttgggaatcacattcacatcatttgtcttcctcagagaatattcatccaaataagctgagaagagttttatattcgaatgctttagcaagtctgaaactgaaagctccgttccttgctgtttattgataaagttgatgatttctattgctatgattgaatctccgcccatttcataaaaatcggatgtaacatcgatcggattgattccaagggcatttccccaaatttgtcctgccattagctctgtttctgaataacagccgtcttccctgccactcagtcttattatttgaggcttgttgactgaagggttatctggtgcattgcttatcggtaatttttcaggcagtttcacccaatgtctctcccgcaaaaatgcgtaacccggcaagctgatttttcttcttttttctccttcatataacatttcccaatcgatctctgcacctttttcatagagcttgcttatatcaatcagaagactctcatctgttctcccgcctgcattataagccttaagtttttttccagcagcggtacttagatctctatcggtcttataagaaaatgcagcttcttcttgctgaaccggcgcttcgagcagactttcaagtttttccttcagatcttcgatgtcttttacgagaaaacacactctattctccagatgttttcttcccgtattcgctgtataacaaagatcagagagattcaaattgttttcttccgagataaaatgaagatactttgatgctatatcattcaggacggacttattttttgcagacagagtgaatacctcttttacctgtctctgttcagtctcacctattatttcaggtgcttcttccaatacaatatgacagttggttccgctgaagccaaacgaacttacaccggctcttcttggcgtctctcctttttcccaatttcttatcatgtcattcacataaacaggtgaattcgaaaaattaattaaaggattcggttcattaaagttgatacttggggggatgaccttctcttttaaagccatgcatgctttaatgagagacgccatgcctgatgccccgactgtatggccgatattgggtttgactgaacctataccgcaaaactgctttttatcggtatatttcttaaacgcattcgttatccctttgatctcaatggggtctcccaaaatcgtgcctgttccatgtgtttcaatataagaaatagtttccggactaatattcgcattcttccaggcacgtgaaatcaatttctcttgtgattcagcattaggagcagtgattccgttagaagccccgtcattattcgtagcgctccctttaatgacagcatatatgtggtctctgtcttctatagccctatgtaaaggttttaatacaatagcagaaatcccctcaccccatgcggtcccctttgcatttttatcaaaaatgctgattttagcgttttccgcttctatttcgctcatcgtacctatattttcaggtctcagaaataaattaacgcctcccgcaatagccatgctgcattcttcatttttaagtgcctcacaagcaagatgaaccgaaacgagtccggaagagcaggctgtatcaacaaccaagcttggccctttcagattaaaaatgtaggaggtcctgcttgccaatatgccgggataagtacctgtcattgcaatcatatccgcatcctttactagggaagcataggaaaacttcaagtcaccgctatgatcatgtccaacgaaaatacctgtattcgaaccttgtaacttgttccccgcataaccggagtcctcaatagcgtgataaactgtctccaaaaacaatctttgtttcggatccataagcatggcttctcttggcgaaattctgaaaaatgatgaatcaaacttatcaatttcatctaagaatcccgctctaaaataagaattctcattcgcactgggcagcaatggatcaatatctttccgccgcttctccggtaagtcccggatgcatgaggcacggttcataatgttttgccagtattcttttgcattattggcttttgagaaacggcaggatatgccgataatggcaatatcaaattgatttttcttggacttatcagataatccttttaaaatgcgcaaagccatttccctgtccattttttgctcttttacttgctccaatacatattgttttataatcgaaatatcatccacgattaatcacccctatcgattttgattctatataaaatatgagaagcatcatggatatatagaatagctgcttcaattgaagcagcttattgaattagttaatttttgtctcaaaaacctttccatcttctttacataacacctgcaccagatttctggcctgtaagacaacactcggaagacctcctcccacttgactccaatgcccaaccatataaaagtctttaagtccgggaagtgaacgtttcagttttttctcgtgcatgatgccttccatctgtttttcccagccctgccagcttccatttctattatttgtgtatcttctgatcgtatatggggtggatacatcagtcacgtcaatatttgatttaatttcaccaaaccatttgtctaattcatcaatcattacattcgcaattgcttttttctcttcttcatatttttcgcggttgtttttttgcaaagtctcccagtattcagcagaagttttcgcatacacgataatactcgttttgccatcaggcgcgaatgaaggattttcgttatatattttcacaaatatgtttttaacgttgtcacagccataggcgttaagaggctgttctaattccagactcaaataatgaggatatttttcaaacgtttttgatacgcccaatccgacataaatttgcggtgcacttgttttaaggttgtcataacaaaatgtcagttcatcatctgtatattttccatccagcatttcaaaaatagttttatagccatccgctgctgaaatgacgatatctccataatgacactgtccgtttttcagctctattccgatcgctttatcattttctactaaaaccttagaaacaggtgatttatattgaatctcaccgcctaattcaacatatctggcttcaataatttttgcgaattgcagagaaccttctacaggatgtcctgaagatttgctattagcccagcctaaagtagccataaagtaagatataggggtatctacattaaaccaaaacagacgatttacattttctcttacaaaactgcttttaaagcgctgggcgaattctttgatcgtcacttttccccattgccccattactttcatgtaagggccagcctttgctttgaaggcctcaaagtctgctaaatcgaacagttcgggcgctttatccaaatccagctctacatcagaaacaactcgaatgccatcagttaaaagcttaattgtttccgcatcttcaggtgcaactcttaaaaactcctgttctaatttatctacatcagcatacagcgtaaatgtatcaccatttctaaagttaacaaccgcaaattcttcatcattaatgaattccatattttgtattacattcagttctttccaaaatttatggaaggtattgttaggtcctgaaccgaccagccagctgatacaaccgtcaaaaaagtacccttttctcttccagccggtacataaaccacccggcagcaagcccatttcaaaaattttcgtgctgtatccgttcatttgcaagtaacagcccgcggccattcctgcaataccgcctccgattatgattgcagtcttgttttcttctgtattcttcattaattttccccttttccgaaactagttttctagaattttcaatccttcttgtatattgattttgccgttctccaggtcgtcaaatagattgttgagttcttgctcaagccgattttcagcagtatcttcttccgtttcttgctgatgatctttattcagctgcttgtcaatatactctgatagctccactacagaggaatatgtaaatatatcggatatatccacaatgtcaggatattgttgatttatcagttttaacagttgggttgccataatagaatcgccgcccatggcactaaagctttcatataaatccagctcttgcatatccaaaaccatagagtacatttgcgcaatacttttttcggtatcagagtaaagttctccctttcctttcagcactatatcttcagtatctgttcttcgacgtttttctgcttcgttttttgtcctgtttttatctattaatttgtttttgatttgctcagataattcaaaagacaattcatccttcgcaaaagcgaggagcttcatatttaatgtacctggaatgatattagtaagcttattcgatgctatttcttctaaaacggaaatagccctttctaccgtcaataatctgaaaatagagctctcatcagtaattccataatcgacagctatgccgacctcatcccaagccggccagttaattgacagcgtgtttttcccctgtttgttttgcatataagcaaaggaatctaaataagcatttgcagctgtataatctccctgtccggcacctccgaaaatagaattaattgaggagaacaaaatcgtgaaatctaaatctacgtctctcgttaaatgattgataacccatgttccattaattttaggagcgagcacttctttaaaaatattagcttcttttctaaagaggaaaccgtccccggcaactccggcacaatggaaaacgccattgatcgtaccgtatttctgttttatttcttcaattaccggctccatgctgtttaagtcagaaacttcacagctgtagcaatcaactttagaacccattgactcgatagctctgatggacttcagttttctgcaaagctttaaatccgttccatcagcaatgatatcgtcccatcggctttgatcaggcagtttagagcgattgagcaatacagcattgacgttatgttttccagccaggtgctttgcgatctccaaaccgattccgccggtgccgccggtaatcatatagacaccgttttctttaatctccataccgccgtgtttcttatcctttatcggttcaaccgtatccaaccgactgatataccgcttaccatccctaaaggcgacttgatagtgtttcccttttgttcttaactcctcactaataatttccggtgaagtatgttcatcaatatcaattgctttacatgaaacattttggaactcctgcgaaataacacgtcccagaccaaacaacgcggcgcccaatggattgattgtattttcttctccggacacttctgtcacaagatcagaaataagatgcaaattaatattgcttttcatcttattcttacttaatccccggactaagcggaacaggctgtatacgcctttattctgcatgtcttctaaatctgttaatgattccgttccttggcggctgatagaagacatatgtataatgctgctgatattttgatcgtttatgctatgcaataattgaacatagtcttcttctgatccgctaattaggaatttccgcccatttatcttctgaaattcatccccaaactccacttcaataacatcatcgtcatgaattttcaactgttccagtatagatttataaatttccatgttgtctttaaataacagtataggacctgttacctctgttttttcttcttcaaaagcttcttgcgccatccattttaattgataaagtgattcagaactttcttcaaaaagggcattaatccgatttactttttttaatacataatcggtgatttctgcaaaaacatttccttctgtatctattaactgaatatcacacagctttgtctctttactgcttgcgttctttttgacaaatgcataaaaatgctgcggcattcttgagtaaatcttcacgcttttatatgaaaaaggaaggaatgtactatcgtcatcatcttctccaataaacacgttcactgcattatctagcaaagcgggatgtaaaaagacgtcttttaaatctgctgtaaattcatcagccaattttaattcggccaattgttcatcagggcccagtatgacttctttgaagttcagccacctcggtccgaaagtaaagactttgctgattaaaccatttttattttcataattgacttttatcttctctctattactgtcattcctaacagagtctaaatcaaacattgatacagagtctgttaatggaaacgcttttccttctgcatgtgtaatccaggtttctccttcctgactggctattataaattgaatacattctttctttttcttaatgattgtgtgtacaatcttattctcatcctcatttactgttaacggagtgaagaagataatatctcgtaattctaattgattgcttttatagtaagcggcacttgctcttcttcccatttcgatataagtcgttcccggaataacgcaagcccccatgattttatggtcacttaaaacccaatccttattcacattaaatgtcgttgaatagatcgtctcattcattgaatcagccaaacactggtcaatcagcgggtgactgatatttttctgatgcggcgcttgacctcttctgtcttttacttctccccagcataatgttctttcaaattggtatgtcggaagactgacaatctttctgcgctcatccttgtacatttttgtccattctacttttgctcctctgacatacaggttgcaaatttccgtaaggtttagcagtaaatattcatccccttcagtaagaatgtcatgtatcaaattgtcagattgagcattcattttgcgatgttcagataaggaaatttctccttcatccataatctgttttctatcagaaccaactttatggaaagaaaaatatacgcctttttctgatatttcattcaggttatgccctgcaagcctgccgatttttctctttaattcttcgtaactttttacaatcagagccaatcggtagccgtaatggccccgccctgtgtttgctgtatagcaaatatgttttacgtttttttgagttccttttttaaagaattcattatattccttgatgagtttcattaaagaattctctgttttagctgataaagtaaatatctcaaatgtttcatttgcaggaatgacctcttcaacctcatctccagcatcttcaatcactacatgtgaattggtccccacaaagccgaaagaactgattcccgctctcctcggtgagttatttttaggccattcatgggctttgtctgtaacaaatacaggtgacttcacaaagttaatcaatgaattcggttctttaaaattaatactcggagggatgacttgatgcttcatagacagaacgatcttgataagtgacgccaaacccgaaacggcaacggtatggccaatattagatttaacagatccgatcccgcaaaactgcagcttgtccgtatattttgaaaacgcattggaaatcccctttatttcaattggatctccaagctttgtgcctgtaccgtgcgcttcgatatattgaatggtttcgggatcaatttgagcattttcccatgcctgaaccagtacttcttcctgggcgatggcatttggagctgtcaatccatttgaggccccgtcattattaactgcactccctttgataacagcataaatatgatctccgtcctgcttggctttacttaaaggttttaagatgactgcagctactccgtcactgaaaaatgtcccgtctgcgtctttatcaaatgagtgtactttatcacttactgattccatcattgattttttggacgttttgaagcgcggaaagaatcctaatgaaattccgctgacaatagacatatcgcattctttatttttcaaagcattacaggcaagatgcacaccaagcagccccgagctgcaagcagaatccaaaaccatagaacttccttttaaatttaataaataattaatccgccccgccatcaaacccggccagttgcccgtcatacttgtcgattctgattctgtaatgtagcggtacaacgtattattgacatggtcttttccaacaaagagcgatgtgttgcttccataaattttgtcccctgcataccctgcatcttcaatcgcagtccataccgtctccagcaatactctgtgagacgggtcaatggcctttgcttctttaggagaaatattaaaaaattcaggatcgaacttgtctacgtcttctaaatatccgccaggtttccagttatctgcttgttcttccgtcagatatcctgaaccgagaaaatcagtaaaccctttattgtttacgatcggtttaatgtaattgatcatatcttttggatattccgctttgcagtcttctccattcatcagattctgccagtattcatctgtattgtttgctttcggcagtctgcaggaaattccaatgatagcaatatcttcattgctgcttgcagcctttaattcttttagcattcgctttgcttctttctggcttagcttatgctgtttcacttgttcaaatatataagattgaacgctattcattacggatcactcccgctttctttctaagaaaatttttgataggaagggtaataagatctacatttttaccttaaaatggaattcagttcccgtaataatgtgataggataggcaggctgctttttcttcattcaattcgcagcctgccaatatccattttgcgaatatattcttacaggcccaattcagttattttcggtctggatgaaatatttgatttgcttcgctgacttccatctctccggatgccagcttattcaaaattgcatccaggtcatcttcattgtcttcttcagggattcggtcagaagacttctgatcactgaagtgggattcaaggtaggttgacatctccttaatggagggatacgtaaaaatatcagaaacatcaatgagagaaggccattctttctctatttcttttaccagatatatcgcggatattgaatctccgcccaaatcataaaatttatcagttatactgatttgttctaagcctaaaacttttatccaagctttcattagtttattttcaatatcgctgaagctaaatgtctgatcggttttcgactcaacagatttttttacaatcgcctgctccttaaaagtcaaaatatccggagataatcggaaatgaatttgatcttgatttaattccagtacccgatgatcaatttccccgatgatcacattccggatgtccttttgcatgacttcatcgaaggcacgtatcgcttcagctgaggtaatcgtcttaaagccgttttcatctttatgttcgtttccggccttttgacgctcttcaatatattcggcaagcatgcccacatccgaccagccgcaccaattaatcgtaactgttttttcatccggtcttcttcgctgtctgcgttctgcaaaggaatccaggtaggcattagccgcagtataatcagcctgccccatactccccgcaagtgctgtgatagaagaaaacattatgaagaaatccagatgctcatgctttgtcagctcgtttaatatccatgttccattaactttcggtctgagcacgttatcaaacacttttttttcctttctgaaaataaacccatctccagaaacaccagcactatgtatgacaccgtggattgtattgtatttactctttatttcctcgaatacatgaatcatttcactttcatttgcgacatccgccttatagtaatctaccttagaaccgctttcttttatttcttttagagcatcgattttcttgttgtttcccttctccatgttgatctgctgctcggagcgtccaatgaggattaattggacattttcttttgatgataaatacttggccatttctaatcccagtccgcccataccgccggtaataacatatacaccgttctttctgatgcttattttcccttcccgaattacggataagtcttcagtctggagctcttgaacgtatttatgccggtctctgtaagcgacaagctctgactgtttttttgagttgatttcaaacaagatgctttccgccataagattttgatccaaatctatgcatctgacacttacacgcgaatattccttttcaattacttttccaaaaccgaaaaatgccgcgttatgcgggttaatgtctggttcttcaccgcttacttgatgtgcaaggtctgcaaacagcatcagttctatgttattttttgtattttctacaagtgattttgttaaataaaataaactgtctacccctgaggatatttttttctgaagctgatatatgtttttgtctttctcattgctgatagacatcaaatggacaatctgagaaaccttttcactttgaagagcttttacaagacagtcataatcttcttgagaatcactgacagtataatgatggcttccgattttagagaaatagtcaccctgttccgcgacaatcacagttttcccttccagttctaaccttcgaatgatttcctcggataaactgcagccattattcttaaataataaaataggatgatgaatttctcgcatctcgtgtgattgatcgctttctcttatccaagatagcttatgatatatattgtttcttttagtcttttcagctgctttatgcaccctttttacgatgtaattgttgatttcaccgaaaacttctccagtgtcattcagcaggacgatgcgaaacgttcctgtttccccgttgcttcggctctttttcttgatataactgtaaaactttttagaagcagagccataaatcttaaattctttataaaaataagggagataggtttcgttatctattgtgaatgtcccggcattaacggcacaatccatcatcgcaggatgaagcgaaaactgaacgaaatcactctcatattctttcggcaattccaattcacatagaagcctgtcgtcgtctctgtagattgcgttggtgcatttccatctgcctccgacttgaacgatgctttccggtctattggtatcttctatatgataaaccgacttgtattcatcggtgtttatttccgtcaatggatgattattacgttgaatgacataaacagaattaaagcttttctttaaatcctcaatgtcatatgtttcccgtaccggttcttctttcgcaatgaccgcttccgcgtgttttatccatttatcgccggtcttacttatcacactaaactctaaaacgctgtcctttttctttatgatcgtatgaacttctttaacttcatttgcttttacctttaactgatttgaaaacgtaacgtcttttaacagaatgccgacaggttcgccgaagtattttcttcccgcttctctagctgtttctatataaaccgttccagggataacgtaagaatcattcactttatgttcatttaaaaaccaataatcagtgacattcaaatgggatatatacacttccagattcagtgactgcactgcaagattgctcaataaagattgttttttctcatcggctgaagggccgtctgcagccagctcagcccataatctttttccgctgaatttgtatgtcggcaagctgaccttttgaaaattcatctcgctataaagatcttcaaagttaatattcgccccatcacaatacatttcacataaaatatgtaagtcagaggttggaatattagagacgtcttgtctgactctttgaatcacattttttattgtttgagtattctgcacactgtctgtatgcgtttttcctataaactttgtttgatttgttatcgattgaaagtatatatttttctcccgatacgttttccattcagagcatgataaaaactccagcttttccagcagttccgcgacagagcttattaccatagcgagtctgtatttgtttggcaatctcccagtgtttgctgtataacatatatctcccagattcacatctgtttctctctttaaataatcaatatgatctgtaagcaagtgcgcgagagatgttttagtcctagctgatacagtaaaaatatgttcagataaaacggattgatcgactttttcaactgcgggtgcctcttctaaaatgacatgacagtttgtaccgctcagcccaaaactgctgatgccgcacctgtatactccgctgctctcccatgctgaaacggagtcattgacgtaaacaggcgattcatgaaaattgatatttcggttcggcactttaaaatgtaaacttggcggaatttttttatgctttaatgccattaccgctttaattaaacccgctattcccgccaaactatcaagatgcccgatgtttgttttgactgaagatactgcacagaactgttttcggtctgtatattttctgaaagcccgttgtaacgcatttatttcaatcggatcccctaatttggtccctgtcccatgagcttcaatatatgtaattgttttaggatctatttttgcatttttccacgcatctactattacttgttcttgagctgctgcgttaggagcggtaattcctactgagctgccgtcctgattaacagcgctccccttaatgactgcatagatctggtcatgatcacgaatcgcttgggccagcggcttcagcaatacggcagcgactccttcgccgctattcgtgccgtcagcagaatcatcgaaagtccttacagcaaaatcagatgaagaattcccgatatttaacctgctctcctctattgtctttgggaatacttttatattcactccgccggctaatgccatatcgcaatccttatttcttattgcctgacaagccgtatggagggcgacaagcgatgaagagcatgcagtatcgattaccattgctggccctttaaaatccaagatatatgacagtctgcttgcgataactgatttaatgttacccgcggtagccagtccgagtaatgattgatctcctttttcaagcaatctgaagtattcatttgagccgtcactgctgagtccaatgtatactcccgtatttgtcccacataattttccgccgccgtaacccccgtcttccaatgcgttccaggccgtttcaataaataatctttgtctgggatcaatcaactttgcttcatttggaaggatactgaaaaagtcacaatcaaatttatcaatctcatccatataggctatttttgtataggctgcatctttactgtacttggttccgctgttttttaatgactggtcagcatctttttttctgttcagaggaatgtctctgatgaactcttttccttgtaaaagtaaatcccaatattcatttacgtgattggcttcgccgattctgcatgataaaccgacaatggcaatgtcatctccggaaatgtctttggtcccttcctcgtttttttgtttctttacattaggagtttgatttgtaaaagcggccgcttttaagttacttaaacttataaagtctgttttcatttttttacctcgctgagaatcactagataggtgatcatacctgtcaaacttcaaagtcttcaaagtgtttttttgtgtttgtttcagaaaataattgattaaatctttttttctgttcatttataggggttttttttgttcgaaacactgacttcagcatttctactgccatatgcatttgttctcttgacggctgacgacctgatgtttcaagttcagcctgtatggcagctactttttcatatggttcgattacacctttggcgtattcctcattgttccagttgtaatttttagtagcaaccgcgatccctaaacttctcgagataatagaaaaaccggcttgcagtgaaacagattcgttcaaaagagtctcttttataatcttcacgtcctcttctttgtcgtagctgtacgatttgatgtcagcgatattgtttcttacaagattccttaatacagatttcggcccaaattcaatcacagtatcagtatgatttgcttctaaatacttcatgattcccatccaatttaccggttttacgatttgagttcccagtatgtcagccatttgctgtttatctgaatatggaagagccgtcacattagataaaactttgtattttggagttctgagatcatacttttttaactcatggctgaatttttccgcagcaaaacccatgatcggagaatgaaaagcagcacttacatttaatttaaaaatgtctgctcctctggctttaagagtttcactaagctcttcaactgctgccgcttctccggataccacaacatctttatatccattgtagttagaaacagcaatcgtttttcctcttgaagagagagattcgcactcttcttctgctattctttcatccaggttcctgataacagccattgctccggtcccttgttcggcagcttctttcattaataatcctctggctctcaccagctttacagcgtcctggaaatccaaaacgtcactgcaaaccaaggcagaatattctcctaaactatggccggcgatatattcaggttcttttccgacctcttccatgtagattctgaattgtgcaatacttgttgccaggatggccggctgagtattttctgtttgagatagctcagcggcacttccatctatacataatttcttcaggtcaaatcccaatgcatcactggcttcgtcatacgtttttttagcgataataaaattgtcacataaacgtttgcccattcctgcatattgagatccttgtcctgaaaataaaaaacctattttcgacatttaaatacctccaaagtccctataatgcctgatttgccttacattctgccgatcagcaaaatgtaaggcagaaccggccgctttatattgaattgtctgctttgtctgctgtaatcacttgaatcaaattcatgtagttataaaataaatctttcattttgtgctcatttagtttctgatggttatatataaaaacgatttctgcttcggatggcttttcatgaactgcaaaaaccagatcatataattctgagtactctttttttgattcattactaatataaaaaagaggaaaaacatcttgggccgaacttgatttcttatagtgagtattcaaatcgtattgtgaatcctcttgattctcaatctgctccttcgccatacgaataatatcgtgaaaattctcgatatcagacagatcaaaagacagctgactcatccgatcatctccatgacccgaaaattggatatgaaccaagttttgctggctgacatcagctaataaaaatacataacccgctaataaaacatgagaaatatcatatttgtaggtattgcatattgtttttaaaccatcataataattcgcatttaccgcatattcgtgcatggctgtatgactttgtccagttgattccgagatgtattcaagcggtaaagtaataggaatgatttctttttccaaggacactgctatctccgcaaaggctatagctgattctatatattcggacaatctgtaaatagtcggatatgcaaacaagtcagcaatttgaatttgttttggatacagcttctgaagctcattataaactgcaacgattttgattgaattaccgcctgcttcaaagaagttatcatgtattccaggctcttctatttttaaaacatcggtccaaacacggctgatacttttttgtacatccgttaccgcttcctcaaaaggccggtcaaaacctgttctatctataacaggttcaggcagtgccaggacatttatttttccgtttgctgtcagcggaatttggtcaattttcataaagatctgcggaatcatatactcaggaagcacaggtgataataacttaataaattctgaaggatatacagtgctttctgccacataatacagaactaaatcttggactcctgcggaatttgtttttccggcagctacacattccttaactttttcatgttggtttactatgctttcaatctctcccaattctatccgataccctctgatctttacctgattgtccattcttccgataacgtccagttcaccatttggcagccaccttgctaaatctcctgtcttatacatcttggttcctttaacaaacggattgtctacaaacttttgcgcagtcaaatcttcttttcctaaatatcctctggccattccggctccagcaatgcataattcgccagtactgccgagcggtacagtgtttccatcatgatctactatatatatctgtgtattcgcaatcggcttgcctatatttacactattttcattggttaagtctttcacagaagaccaaatcgtcgtctcagtcggaccgtacatattatagatcttcagatttttatatttttttagctcaaataacaattcccgttgaaatacctcgcccccaaccatgatggtcttcaatttctgaagactctccgtactgttttctgcacttagcatcagctttaatctggatggcgtaagctgaatagtattgacatcagtctcaacaacgatcttgtttaacaagtacggatctctttgttccgcttcaccggctatgacaactttcagcccttgagttaaaggcagcagcgactctaatccgaatatgtcaaatgagcacgtggtgaccgaaagaaggacattgtcttgtgaaaagctgatcctgtctgttattcccttaataaagttatgaacggcacggtgctctacggcgacccctttcggttttccggttgatcccgacgtataaatgacatatgctaaatcttcggccctgttaataacatcaatgttcgtctccaactgatgtaataaatcctctgaatctatgttaaatatggttccgctgtacgttaattcatttggaagtccttcttcagttaacagcaggccgcttttactgtctttcagcatataattgatcctgtctgccggataatcaggatcaagcggtaagtagcatccccctgcctttagtattcctaatattcctataatcaatcggaaagaccttcttaccaaaataggaaccacaacattctctttgatgccgttttccctgagggctcttgccaattgatttgccttattattcagctccttataggtcaagaagtctccgttccattccagagcgattgcatcaggtgtccttaaagcttgctcttcgaagagctcttgtaacgtcttttctttcttatatgataattccgtgcagttgaattctttcaccagcttttgtttctctgtctcatttaccatatcgatctgagaaactattacttcatgatcagccgctgcctgctgtaagatgctaaccaggttatctaagattgaacttaccgtttctttactgtaaacactggcgttatatgtgattttcatatgcaagtcgtcaccgggagcaattaaaagctctaaatcatagttggtttgttcaaacccatgttcagcagttatttttacactcgaacgggctgaatcttggaaaagatcctcactcaacgggtaattttcatacacgactacgtgattgattaatttattcttcatacttgtcaaagactgtatgtctgccagagaacaataactgtattcgttcgcttcaataaagtctttatttatttgtttagccaatgaaataaatgatgtatcacattctcttttcactctgattggcactgcatttataaataagccgaccatattttcaattccgtttatctcactcggtctgcctgaaacaatggaaccaaataccacatcatttgtattgttatatttctgaagcaatatcccccatgctgtttgaacgatagaatttaatgtaatgctgtttgactcagcgatttttttcagcttagcggcggtttcaccgttaagcgctcccagtttttgatcatgctgatactcgtcagatttcaattccagttccggaaatgagatctcttgttcatatgcagaaagatattccttccaatattcaaatgcacggtccttgtcctgctgatcaagccattcaagataacgactgtacggtacaggtgattcttgaaggagttttttcccttcagccacgtcaccatatagatccataagctcttttaacaggataccgacactccagccatccaaaataatgtggtggaaactgtatatgactttaaatttatttcttcccagcttgatcaccgatactctgatcagacaatctttgttcagatcaaacggagtattcctgtctctcaccttgaattgccctacaaaggcatccttcttctgctcctcccattggctgatatcatgatattgaatgtttagttttctttcttttaaaatggcttgtttaaatacacggaaaccgttatagaaaaatgacgttcttaatatttcatatttagcaatcagcctgtttaatgcgtcactgagaacttctgtattcagatttccttcaactgttatttcactttgttcgaaataagcgctagattgatggtcaatcacagcgttatacagcatgccttcctgcatcggtgaaagagaatgaattttttctacttcagcaccgcttgcaagaatttgatttagctcctctatttgaagatcgggatccccataatcccatggagttttctcagatattttcttattcacacaatgttctatgatctgatttattttcaattgataggctttcgtaaattgctcaatcgtctctcgtttatattggtttgcactgtaattgaacgtaaacatcagcctgccatccatgatatatccatttatttctatactatgtgtctttttatttcttccagatatgctcgttccggcggacaaaggtgatatttgaaataggttgctgcgatcttcttggccaaattcacccaagtagttaaaactgatatcaggttttaattgaagatgaaccgagtccgacaaatatctgagtattccgtaaccaatcccgttatgggggatatgtctaagcatttcctttgtatacttaatggagcttgataaactattactttccgtcatatcgagaacaattgggtatattgtcgtaaaccaacctattgtgcgatggaccggggtttttataacactttcacggccgtgcccttcaagattcacaaggatcttctcgttgccggtccattctttggctgcaagtcccagtgagcaaagcaatatatcattaatttgtgtatgatatgctgcatttgtatttcttaaaagtgtttttgtttgatcctctgttaattcaattttaatttctttactatcttcataagagcagctttcggcaatgaaatcctttggaagaggttcaataatagccgtttctatggtctcccagtacccagcttccttttgaagagccttgctgtttgcatattctttcaattgacgcgcccattctttgaacgatgctgttttagtttccagctccaccttgttcccattaactgtttgaagataagctgtttcaaaatcttccaataggattctccaagatactccgtcaatgatcatatgatgaatggttaatagaagatgatctccgtttttggttttaaataccgccagttttattaaaatccccttttccaagctcaattcgttctgcatacggtcagccagtgattcaattgccatggctggatcttctgtttgtgtcatatcaaatacttctaaagtaaatgtttcttttgcctgtttaatgcccctattccattgcttaatttcaccgttttcctttttaaactgcatcctgagggcatcatgatgcctcaccagttccaaaaaggccgtttcgattgctttttcttctatgccggactttttgtaaagcataaaggcttggttatagtggttttcttgttcaaatctctgttctataaaccatttttgaatcggtgtcagatcaacgtctccttctacaatcgactgatctgcttgtatatcagctgattttacgtgagcactcaagtcttttatgtgcggatatttcattaaatctctgacttccagttttaagccgtatttttggagttcggaaactactaaaattgatttaattgagtctccgccgatctcgtaatagttatagttaatcccgattgatttcatccccagaactttctcccatacgcatgcgagaatttgttcctttttatttcgcggtgcttcatatgcagactccaatacatccgcaatatctataatcggcaatgatttcgtatctatttttccgtttgaacttaacggcattttttcaatctggaagatataacttggcaccatatataacggtaattctttagacagattttcttttaaagcataaacatctatttttttgtcggaagtaacataaccgcagagatatttatccccatgttggtcatctctcgctacaacaacagcctctcttatgtgactcattttcagaagccggttttctatttctcccgtttcaatacgatatcctctgattttgacttgatcatcaattcttcctaaataatcaattgtcccgtccggcatccattttgccatatcccctgttctgtataacttagccccgggttcaaaggggttatctacaaatttttctgacgttaagcccgctttatttttatatccgtctgcaagtccttctccgctgacacaaagttccccggctgcccctaaaggaagtaattccaattgttttcctaatatataaagcttagtattatccgcaggtttgcctattgatactgcattgccattgtctctttcaatatgatattgatgaatcatacacccgactgtagcctctgtcgggccgtattcattgtagattttgacatgaccgttaaatgcaccgtgtatcttttttgcaagcccggttttcagctcttccccgccgacgattattttttttatctttgacgtacttaaatctacattctccagcaatctcaaatgcgtcggcgttagcttaataatatccgctttattttcttctataattcttctgatcagaagagccttgtccggtccctcataaataataattttatttcctgaaataagcggtgtataaattgaagtaaccgttaagtcaaaagaaatagaagaatacagaggaaaatcaatatcttcatcatttacatatatcttatttgcccaatgaatataatttaccacgcctttatgttttaccatgacgcccttcggcagccctgtagtccctgaagtataaatcatgtaggcaaggtcttccgggcaactgacattcggcagattacttctgttatgcatatatagagtaggatcacttaatgataaaatttctttattgaatgtaataccacctgacaatccgttttgaattaggagaatgtttgcatcactgtctttcagcatgtaatttactctttcatcaggatattcaggatctatcggcaaatacgctccccctgctttcagcaccccgataattccgatgatcatctcaagagatctctctgtcatgattccgacaatgctgttttctctaattcctttttgtctcaaaagattagccaggctgtttgatttctcgtttagttctttataggttaatagcgtatcttcttggacagccgcaatacgttcaggtgttttttctgcctgctcttcaaataattgatgaatcgttttattccgaggaaattcagctgccgtgtcattgaatatatggagcaatgtgtgcttctcctgttcaggaatcaaatccagtttcattaaaggttgatctaggccggcagctgcactttgtaaaagcttcgtaaaatgggcacccattctctcggctgtttctttttcaaataattgactggagtattccaagtggaacttaattcctttatcaatttccgtcgcggttaacgttaaatcgaattttgaaatattgatctcggtttgaatatgctcttccggatttggatccaagtgattttcaataccgtaatctgcattttcaagtacaaacatgacatcaaacagcgggttccggctcgaatctctttttaccccgagtttttgaacaatattttcaaattggtaatctgtattctcaaaatcttttaacgtatgatgtttgacctcttctaaaaacgctctgaatgttttatgttcctcaggaaaatttcttatggcgacggtattgacgaacatccccaccgtattctccagttcggtgtctgaccttccggactctgccgttccgatgatcacatcctgctgaccgctgtattttgaaagcatgatattatataccgccagcagcaccatgtacaaagttgttcctgtttctttcgccaccgactttaagcttgatgttaacctttcatcggccgtaaagctgactcggcttccttcaaagcttttgactctcggccgctcgtaatcagtctgcagattgagaatcggcagatctccgcttaaccgcttaagccaatactcctcttgttcctttaacgcctcttttgttcctgagcttacttgccattctgaataatctttatattgcagcggcggctgttttagtttatgacccgcatacagcgcattgaattctttgcggattattccaaccgatacaccgtccgcagcgatatgatgaacatctaacagcagcagattccggtcttcatacgttatgagtccggctctgattaacggtgctttgtccaaatgaaagggtctgataaactgcttcacatatggtcgtatcccatcagacggcagcttctgataattaaattcgagctcccatgtatcgtgaataatctgaaccacatcgccgcttacaacatcgaaacttgtccgtaacgcttcgtgtctgccaataatctcttgtagaactgattcggcttttttcacatctaattttccgtttagttcaatcataatcggcaagttataaacgatactgtctttatccgtctcccaaagggcaaacattcttttctgagcagatgacgcttgataagaagactgctttctcgctttactgatgaccggataattctgtttatcccgcttttgaataagacggctcaactgtttgatggtaggctgctcaaaaagctccttcacctttatatccgtgccgaatgtttttctgatgcgggaaatagtgaacgcagctgttaaagaatgtccgcccagttcgaagaaatcttcatttatactgatccgtttatgcccaagcatttctttccaaatttcagctagtttttcttccgtttcatttgccggagcttcgtattgaggtactgacaaccgttgcaagtcaggaagaggcagctcttttcgattgatttttccgttagctgtaagaggcaactctttcagttgtattatgaaactcggaatcatatacttcggaagaacctgtgccaatttctcctgtacgaacgagccttccatctcaatgtccccagtaatatatgcagaaagatatttctcctctatataaacaaccgccgcttcttttataccttccagctgtaatagttggttttcgatctctccgatttcaactctaaaacccctaattttgatctggttgtcaatccggcctaaaaattctatatttccatccggcatccatctgccaaggtctcctgttttgtacatttttgctccacgatgaaaaggattatcaataaatttttcattcgttaattcttcattattgacatatcccgatgctaaacctaccccgctgatacaaatctcaccaggtgctcccacagggaccagttgatctgaacgatccacaatatagatattaataccgtgaattggtcttcctattctattgtatatttcacagttttgaatatgatctagatcaatgctatgtgcaatacagccaacagtgctttcggtcggcccgtaatggttaataaacttcatccatctgcatttttcagcgagctttttgacgttgccgatgtttatgctttcgccgcccagtataataacttttaaatcaggacaagacgccagcatgtcaacatcctccatcaatgttgaaaataaagtgggtgtcattttaagatatgtaatactatttttatgaatatattctattaatgatagagagtgaagatacacttctttatcaacaaagtggacttgtccgccaccggataaaactggaaatatactggtatagcataagtcaaaactatattttgacgtcactaacgacctgctgtcagaatttatgtttatttgatcacatacccataatgaataattaactaatgatttatttttcaccttcacccccttcggttttcccgaagtacccgaggtatatataacatatacctcgtcctcgagatcatactgaacatcagggtttgatgtattttggctggtataaatcgatttatccgtaatatccaaacattccgccgcaatgtttttatcagctaaaaagcacaaatctgtaatgaggatatcagctttgctatcttttaaaatatgatttatccgactgaccggtgattcatcatcaataggcagaaacgcacttccggtttttaaaattcccagcatcccaatcattgaatattctgaaggacggatcatcatagccgtaatgctgttttttcctgcccctttttccattaataatgttgcaacttgatttgccttttcgtttagctctttataagtgatatgctttcctgcatagacagccgctgtttggccaggtgtcttttccgctcgttcttcaaaaaggtcttgtatcgttttattcaccgtataattagaggactgcttattaaaatcctggagcattccgcgctcttcttcatttacagcgctgatgtctttcaggacacgcgtaggatcagttgccacttgctttaacacatgacagaaattaacacctatacgattaatgatatcttcacgataaacattattgttatacgtcatctctgctttgatttggctgcctggaataataaccagcccaaagtcatagttcgtctgttcaaacacttccatatctgtaatccttaaagcatcagttgtattatcgaccgccttgccatagtcatcaacaggataattttcataaaccaacatatggttgatcagtttctctttcatctttgtaagagcttgtatatccgctaaagaactgtaaccgtatgatgtattcgctttgataaagtcactgttcagcttttgggctaatgctataaataccgtatcaccatcgccttttactctcagaggaaccgcattgataaataaccccaccattttttctatgccttgcactctgcattgtcttccggaaataaccgcaccaaaaacaacatcatccacgttgttatacttctgcaaaagaactccccatgcagtctgaatcaatgcacttaaagtaatgtgatattgatcagctgcagctttcaacatcgaagtacatgtttcatcaataatgaatgttttcttcctattattgaaaccgccctcatcagcagaactttggaataccggcttgctgctcatattcatttagataatccccccaatattctaatgcggcacttttgtcctgattatccagccattctaagtaggtgctgtaaggctcggtatgctgaagcactgtctctcttccttcttttaatgacgtataaatagtttttatatcattcattattaaactcatacaccagccatccataataatatggtgaaaactgaacagcagtttatattctttctcatcagtttttaatacggttactcttattaagcaatcattcgtcaaatcgaatctcgttcccctgtctttaaactggacatttttaagccggactttcttttgatattccgagaaagtgctgatatcttcaaattcaattttaacttttctctctcttagaacagcctgtttaaacttacttaatccttcatgaaaaaagcatgttcttaaaatttcatacttctcgatcagcatattaaaagctgtatttaatctgccaatatcaagctgaccggataaagaaaatgtaagctgctcaaaataggcttgtgaaaacggatcaagcaatgcatgataaagcatcccgctctgcataggagtcagggagtggattttctctatctcttttccgcttgataaaatctgctccaaatctccgatggataaatccagatctccatagtcaaagggtgttttttcaggaatttttttcattccgcaatgctgaataatatcgattaaccggtttatataggattcggttaatgttttaattgtttcttctttaaactctttcgtactatagttaaattccaactgcagttgaccgtccataataaagctgttgatttcgatggcattcaattttttattagataaagaaacacttgtaccagatgatatatctgcatgctgaaaaacagcccgctttttttgagagatttctcccagatagttaaacccgatctcaggctttatcgtaaaactgatgtcttttttatgtgccggtgccgtcaagtatttaataattccgtaaccaatacctttatgaggtattcttcttaaatactctttcgtattttttatgcaataaggcagatcatcactgtgctccatatccagcacgatcggaaatagtgaggtgaaccagccgatggttctttctattgaaatattttctaatatgttctctcttccgtggccttccagaccgattaaaaccttgtcaagtcccgcccattcttttactgccattcccagtgaacaaagcaagatgtcattaatctgtgtgttataagctgcatttgtattcctctggagcttatcagttaactgctttgtaagactgacagtaatggtgcggctttccttaaatacactgtcagttttattgaaatctctcggaatttctttaatcttcgttttctcgatattctcccaataccgaagttcctttcttatctcacttccgtttgcatattccgccaatttacgtgtccattcttgaaaggatgccgtttttggcggaagaacggccggctctcctttttgcagattgttgtagacctgctccatatcttcaagcagaattctccaagagactccgtcaatcaccatatgatgtatagcaataagtagataatcgcccctcattgttcgaaataaaccaagtttcattaaaagtcctttttcaagatccattccgctttgtaactgatcggcaagtttttctattgtatttttgtaatccgtatcagcaagcagatcatatatgtccagagtaaaagtatcccgggcggcttggacatctctgacttcttgttttatttcgtcattttcggctgtatatatcaacctcaaagcatcatgatgctttactaataattcaaatgtctttgccagagcgtgttcattaattttttctttcacttgaaacatgaatgcctgattaaagtggtgaatgtccgcaaagtcattctctataaaccacttttgtatcggtgccagttcagttctcccgctaaccgggctctgatctgtttgagctttatataatttcacgtgtttactgaggttttttatttgcggatactgcaaaagatcttttacctctagactgagactgtatttttgaagctttgatacaatcagtatagattttattgagtctccgcccagctcatagtaattatcattaataccaatatcatcaattttcagaacttccgaccaaacatttaccagaatctgttcgacttcggaacggggtgcttcaaggtgctcctttatatgtttaggctcttctatttctgcaagtgctttcctgtcaattttcccatttggtgtgagaggcagctgttcaacctggatgatgacaccgggaatcatatattgcggcaaaatgtcacccaattgctccctcaaagctgctccggatattttatattctgcggttacaaatgcagaaaggtatttgtcaccgtgaaggtcgcacttatctataacaactgcttcttttatcccgcttattttcagaagctggctttctatttcatcagtttcaatccggaagcctctgattttgacttgattatcaattctccccaaaaattctatgtttccgtcaggaagccaccttgccaagtctcctgttcggtacattttagttccggactcaaatggatgatcaataaacttctcacgcgtcattttctctttattgagatatcctcttgctaagctgtcacccgacacacacaattctcccgctaaaccaataggcacaagattgttgttgtgatcaattatgaaggctttcagatttctgatcggcttaccgataggaatggtctttgccatcgccctctcagcttctgagtatctccacattgtagagcagattgtcgtttcagttggaccgtaggcattaatatagtctattttattcacgatccggttcaaggattttgtagatatctgagaaccagcagtaattaagagccttaaagctgataatccgtttatatttatatggttgatgtatacaggcggcaaagtggctacagtaatgtcatgccggttaatatactcttcaaataatgtataattattgatgacttgacttgaaaggatgtgtagttccgctccggtcaacagtgccatactgatttcccacactgatgcatcaaatgaaaaacttgcaaattgaataattttatcccggtaattgatattcatatcatgttcaaagacacttttgagattactgattccgatatgccggatcgttacaccctttggttttccagtcgttccagaagtataaatgacataagcaagatgttctgcggaactcatcattggcaggttatgccgatctccggtgtaaagagaactatctgttaaatcaataaccttcccgtcaaacggaatattgtcagcctgactattctgcactaataaaatgtcagaaccgctgtcttcaatcatgtatttgattctctcagaaggatatcccggatcaattggcaaaaatgcgcctcccgccttcagcacacccaatatgcctaacaccatctctaatgatttgtcagcaacaatacctactattgactcttttttcacccccattttcattagtattctcgccagactatttgatctttcgttaagttctttataagttactttattattttcatacactgccgctattctttccggtgtcttttccgcttgttcttcaaacaattgatggattgtcttattatgcgggaagtcggctgctgtatcattgaatacataaagcagtttatgtttctcatcatccgttatcatattcagtctgcagattgccgtgtccggttctgatacaacctgttgtaaaagccgggtataatgagcacccattctttcgactgtgtctttcctgaataaatgattgcaatattccaattggaagttaacgccttcatcggtttccattgcagttaacgttaaatcaaatcttgatatattgacctcagataccagtaaatttgattctgctgtctcttcatttcctccgaatccgtaatccttactctcaaaagtaaacatgacatcaaacagcgggttccggctcgaatctctttttaccccgagtttttgaacaatattttcaaattggtaatctgtattctcaaaatcttttaacgtatgatgtttgacctcttctaaaaacgctctgaatgttttatgttcctcaggaaaatttcttatggcgacggtattgacgaacatccccaccgtattctccagttcggtgtctgaccttccggactctgccgttccgatgatcacatcctgctgaccgctgtattttgaaagcatgatattatataccgccagcagcaccatgtacaaagttgttcctgtttctttcgccaccgactttaagcttgatgttaacctttcatcggccgtaaagctgactcggcttccttcaaagcttttgactctcggccgctcgtaatcagtctgcagattgagaatcggcagatctccgcttaaccgcttaagccaatactcctcttgttcctttaacgcctcttttgttcctgagcttacttgccattctgaataatctttatattgcagcggcggctgttttagtttatgatccgcatacagcgcattgaattctttgcggattattccaaccgatacaccgtccgcagcgatatgatgaacatctaacagcagcagattccggtcttcatacgttatgagtccggctctgattaacggtgctttgtccaaatgaaagggtctgataaactgcttcacatatggtcgtatcccatcagacggcagcttctgataatcaaattcgagctcccatgtatcgtgaataatctgaaccacatcgccgtttacaacatcgaaacttgtccgtaaagcttcgtgtctgccaataatctcttgtagaactgattcggctttttttacatctaattttccgtttagttcaatcataatcggcaagttataaacgatactgtctttatccgtctcccaaagggcaaacattcttttctgagcagatgacgcttgataagaagactgctttctcgctttactgatgaccggataattctgtttatcccgcttttgaataagacggctcaactgtttgatggtaggctgctcaaaaagctccttcacctttatatccgtgccgaatgtttttctgatgcgggaaattaacatagaagcctttaatgaatgaccgccgatttcaaagaaattttcatctataccgacgcgttccctgccaagtacagcttcccaaatctccgaaagttttttctccgtttcatttgtcggcgcttcatattttgtttcggacatttgagatatatcaggtcgaggaagtgcccgtctgtcaattttcccatttaccgtcaaaggcatgttatccatttgtttaaagtacgatggaaccatatattccggaagaaagtctctcagaaagtgctgcaattcaatctttgcgattttatgatttgaagtgtaataagcacagatatataaatcatcatcaccattatgatttactgttactgccgcttctttaatttctgtatgattgatcaatcgggcttctatctccccaagctcgattctaaaaccgcggattttgacttgctcgtcccgccgtccgataaactccacatcgccattttctaaataacgcactaagtctcctgttttataaagacgtgctgaaggatcattattgaaagggtgtgatataaaccgttccttcgttaaatcaggccgtcgccaatactctcgcgccagcccatctccgccaataaacagctcaccaggaataccaggcgctaccggttttaattgcgaatctaaaatgaatatttctgtaccagaaataggcctccctataggaagcgtactgcctttccaatcatgagggaccgggaaacaacaggtaaaggtcgttccctctgtcggcccatatccgttaattacttgtacctttccaagtgctaatactttttgaacatgcggaacggaaaccacatctccgcctaccaataattgctgaagcccttttaatgattctaactgctgatcaactactagagaaaataaaccggccgtcagccaaagagtcgtaatgttatatttttttacagcttctgcaatatcatcagccgtcggtattcccggaggcattatagccagacatcccccattcaataaacagccccagatctcgaaggtagaagcgtcaaaagcggcagaagctaattgcagaaacgtttgattctcatcaaataccgcataatcagtctccttcaccagccgaatcacaccgcggttaacaatacttactcctttaggcagtcccgttgagcctgacgtatacatgacataagccaggtcatccaaggaaccttttatgccaatattagatccatccatcttttcaatttcttctttcataccatccaaacagattacgccgtccccgtgaggcgggagttgtgactgaatgctttcgtttgtaatcagcaactctacacctgaatcttcgattaagaatgatagtctttgcttcggatattgagggtctaacggcacataagcaccgcctgactttaatattgccagaatactaatatacaaatcaaaagagcgttctaaagcaattccgacaaggtctccccgttttactccgcactcctgaagataccgtgccagctggttcgcacggtgattaagttctgcgtaacacattgaagagttttctagtaccaaagcagtcttatccgaatattcatcagcctgctgctcaaacacctccgaaattgttccaattttcgaataattatcttcccagccaaagattttcttttgcttatttttttctttcaggaatctcatatctttcactctgatattttcaggagttatcatagcttcaaggatcatctgaaatcgcagtgacaaatcttttatcatattttgagaatagaggcattcgttatagtgtatggctgtctctatgtattgtttctggtttataaacgaaaataggatatgaatagcgggattttcttgattaagtatgtattcttgaatattttcaaggactatcatgacatcaaaaggaaggccagtcattttatcacttgttcgagaattattttgggggctttccaatgcctgttctacggtgaattcgactttatgtatgatctcttttaataggtcttcaccatgaacagcatttttaagagtcaaaatttcttgctcagaatcaatcgttctgttctttctgaaaacaggagtcttgattacaatattttgtctttctgtatattgatttattaacaaagtcagtgccgctgttaatacgacatgcagacgttcatccgatccattgcagcatacattcagcttatcgcttaattgctgtgacaatttatatgtaagatttttcattcttttttctttagaagatttacttcccactaaaaaatgctcttcagtttttaactcaccaatactgtttttatctccctttatactttttgtcataacaaaaactccttcacttgatatcaaaattcaattcattcactgaattaaaacagcagaggctttcggtggatttttatgttaaactgcatcacaggcaataacgctcaccaataattgttgttgtagtctgacagtttatttatcggcagcaaaaaccattttttaatgatatagacccgtataaacactttttttaaaaaaaggataatgaagaagaactagccatctttaagaaatattatacaaatatttaagagttgtcaattagcagggaaaaacacctaagcacattaacccagtttttatttttcgtattaacataaaaaaaccgggacaaagtaacactcccgatttttcaatcaacaatttatctcaaggttttatttataatgtcagttatttcattcgaaaattgatgaataaaaaagtgatttccttcaaacgtataaaaattgcatttccctaaagtataatgtccccaattacatattaaatctgagcttatcgtcttgtcattaataccatgcaacactgttatatcacagtccataacagtcttattttcagaaataacatccttttctaacattttgaaatcacttcttaaaataggaagatataattgttgtaattccttgttatgtaacagttcttccgaagtcccgcccatatccatgattctttgcaaaaataaattatccggcaaagcatgaatcatcccctctgcttttttcgttttaggaatgccgcatccggaaaaaaatatgtgattgggcttcttctgctgcatttcagcaattttacaatataacttataaactaatcggcctcccatactgtggccgaataaagcataatcacactccctgatttgatcctttatcagatcatatatatcattaacagcctcatctatatgttcataaaaatcttcgttaattcttgtacctcttccttttaactcaataggatgtattgttaaagagtcactcattaaccttctccatttatagtatattgcacttgatcccctgcatacggaagacaaaatatttttttcataattcacctcagaaattttgtaataacccgataaaaaaacaccctgaaaaggatgtttttactatctcattttatatatgaaatgctcttgaaactccgttgatgatgaggaagattcctattactcttaaaatgatccttgttgttctgttatcttttccaaaagcaacttgcccgattttaccgataaatacattcatgagtacacctataattaattcagccattccaaatagttcttccatacccaatttcctcacgtcctttttgatctgttaattttatccgattattgttgatttaattttcttttttaatctccctgcttatcaagatgaaagatacaataatacttaataagccgacacttgcaaaaattacgatcggaagccattcagttcctaaggtactcttactaaagataatgttgtttaaagactgtattgcccatgcttcgggtgtaaatttagaaataacctgcatatattttggagcaatttccaatgagaaaaaggaaccgcctatcatcccgcttactgcaattatgatcgatgcggcagaagtaaactgcttttggcttctcataaatggaaccataatcatcgtaatgcaggtcaatgcaaataaataaacagcgagcataacagcgatggcaaagatgttatgacctatgctgatcttgagtaagtattttcccgcaagtattataacgattatatgaatgattccggaaatataagtagcagccattttggataaaacatattttgtatagtttataggcgtacttagtaatcggctgaaagtattattctctttttcatcaataagtgttcttaacccttgaataacaacaaaccaaataaacattacaagaaaaccaattaatctcacggtcgcattatcctgagtatgtttaccctggcttaatgttttgtcattcacttctattcctgaattgtttttcaatttcttgaaaatgttcttttctatatcttttgagtccgtatgcaactgcgcagacatatattgcgaatctttaactacctttttaagagttcccgcctcatttttgaccagctgctctaacaatgttccgctgccgttctcatagttttggatgattttcatttttatcttgtgattgtccgccaattcctttccaaaacctttttcaataacgaccccaaaaggaatatcctgatcatcgacttttttctttatttcattttccgttagctttataactttaatatttttatgctcttttatcatttcaatgagctttgcagcatagttgcttttatcagcattggctatatacaagttctctttgctatccgtatcttgggaaaaagagaacaaaaatgtaaggattaacggcactgaaatagttgcaaaaattgctaatctatttcggagcatcagcttcagctgatgtttaatcatggcaatcaattgcactactacgccaccttcttcctgttgaataccataatattaataaagacaaagatgagaccaataccaattagctcaagcaaatcaatatacatgccgctaaggccaatattctgtttgacttttaaataagagtttattgccttaccgttcggtatgatctcttggacaaccctcaagctatcaggcagtccgttcttaggaataaaactgcctcccaaaaaactaaaaatataaagaaccggagaagccatactggacaccgccacgtggtccttagcggtaaaaccccaaaacaatacaatgctgcctatagcaaatgcgtatactaccgtaataacaaaaatatcaaacaagttgccccagttcattcggaatacgacccagcttatcagaataacagcagtcatctgcattaagatcgcaaaaataatacctgtcaactttccaagcacatactgaatatttaaagtcggtgtagatttaattctgaacagcgtattattctgccgctcatcaacaatgctatgaacaagcacaaaagccgtcataatggaaaacataacaaccattgcaattgaataatactgcatggaatcgacaggaaccgcatttttatttgtcgctgcttttgggatatcagcggagatcccgtcattatcggccaaatcgttcatcattttttctattttttcttttggtacgctgccgccggggctgatatgttttattacttcttgttgctcagcactcattgttttcacgcttttcgtaaagccctccaaaacagcctgaacaatatttttatctatggtcttattattatctccaattaaatcgatatttgttttcccgttgttcataacggctttcgtaaagtgttccggtacatagataaaagctgcagcctttccttctttaactaatttttcaccgtcattgtagctctcagcttcttttaaatgaatgatatctttgagatctcctttcttaaaaactttatcctttaagacatcacctaaagaaacactctctcctgaatctgctgagtaaaaagctacatcaaatgcttcgatttttgaatctgaattactgaacacactgcccaatatgaggattagcagtgatggaaacagcatcagctttaaataaaatgacttattttttgttaacagcttaaaatcaagaaaaaataagttgaataattttctcaagatagcctcctcctactaatctcttaggtttttccctgtaatttgaaggaaaatgctttccaaatttacttcctcgtacttaaagctagtgaggtcgatccccagatttttgatatcatctacaatttcaatgatgtttctttccttcgtcgatacaagcattgaaatttgtttatgatctaccgtcactttatcaattcctgtaatgctgtttatccggctgagtgcctcttcatcagcacccttaaaagtaacagttaaagtgtcacaagcatttaagttttccttgagttcttctttcgttcctaaagcaataagagatccatgatcaacaattgccaccttctcgcaaagatactctacttcttccatatagtggctggtataaataacagtcattcctttttctttattcagcctttttactgtttcaagaatatgatttcttgattgcggatcaattcctacagtaggctcatcaagaattaataatttaggattattcattaacgccacgcctatgttgacccggcgtttcattcccccggaaaactctgatacattttgattttttttatctgtcagttcaataatctccagaacctcatcagttctttcttttagctttttccctttcagcccgtaaaggcttccgaagaagttcaagttatctttggcgcttaacgtttcatataaagctaaatcctgtggaacaacccccattattttttttatctcaataggtttttccttaagtgatttattatctactttaattgtcccgctggtaggtgcaagaacagtgctaatcatagaaaccattgttgatttgccggcaccgttaggacccaatagtccgaatacttctccatcttctacagtcagcgaaatattattaactgccgtaaagtcatcatattttttggtaagtttttttaattcaagcataattaaaacacccctcgtggtatttcggttcttttattttaacctgaatggaatatttttagaatttactatagtactcatttaccttattactttagttacgaatcgcatcgttactttagtcatatacggaaggtgtaagtccggatatattcagaagaaaatggaggaaaggaatttgatgaaattcctttctgattgaaggaaaaaagttgaatcacatatgcttttgtaaatataagctaagctccgttcggttgttcatttgaagtttttccagtattcttgatacataatttttgactgtgccttcagtaataaacagtgcttcgcttatagctttgttgcttttcccttccataatctgtttagcgacttctttttctctgggagtaagcaattgcaccagctgttccttttcattattttcttgaacaagctctttattatgttctaccgaatttagagcctttacaacttttagcgttaccttaggatttaacagaatattgccttcacatgctgttttgatggaatcaataatttcttgtgaatcagaatctttcagtatgtaaccatcagcaccgcttttcagtccagtaaaaatgtattcactatcgttaaaggttgtcaggataatcactttaatatccggatatctctctttaactagctttgttgcttcaatgccgtccattacgggcattcttatatccattaaaatgatttcaggccttatctgttttagcaaatctaataaatgttcaccattagaagcttcgcctacaatattaatttcctcgtgcagactcagaatcattttaagcccttccctgacaatttgctgatcatccacaatgataatatccatatcaatacctcctcacattccgattaaagatctgctatctcggggattacggcttccacagtaaatcctgaatctagccctgaataaaaatcaacctctcctccaagtgcggcaaatcttttttctattccgtttattccatttgacttattaatttcagaacatcctgttccgttatcagttatcgatatagagattttttcaaaagacttacgtatttttattgaaaaaaacgtagcatttccatgttttatcccgttggttatagactcttgtactgttttatagagacaattcttgatatctggatcagctgactctactttattgtccatatcaagctcgaattttatttcatttgtttgctgaaaattttcaaaaatctcattgatcgatttcagaagccctttttgaggagcagggtcattgagcaaagcgacagcttctctcaggttaataatacactccttcgataaatcatgtgacttattgatgacttgtttagcctcgccgggatttttacttactattttatcggcgaattcaagattcattgttaatgcgatcaaataatgccccagggaatcatgaagctcttgtgcaattcttgtccgctctttagaaatagttaactcttgaattttttgagaataattcttaagtttagtgtttacactttgtaattctttatttaatgtttgtatttttgctttttcgagcagtacgtttctaaacagataaataatagccatgatcactaaataggacatcaatatatctttcccgctggtccctgctgctttaagagctgtaaaaaaaataataaaatgcagacttactacagtccagggcagtttacgagttgttacaataatctcgatcagtaaaaaaatattatatatttgagaaccgagacagttaattttaaacaataaaatgcctgataaaaggttacttactaaaaaagatgcataatatctaaaagaatactgaccgcttaggtattttaatctgatatgatcgttgacgactaaaaaaatggtgataatcagcaggtaagcggattccgaagccgtaaaagttggcgttttaaaaatagaactgataatagaatataaggaaaaacaaataatggttttctctatgagcactcttgtactaattgaagaaagatttttcataataatccttcccgagacaacttgatataaattatattatacatatattgagaaatcataaagcgacaacctccacgttcagcacatcatacagctcatcaagcgaatgaatttcatacgtcgggataatcccggactcatttgctttctttccgggattaaaccagcacgtatccattcccgccatctgaccgccttttatgtccgcgctcaatgaatcgccgataataagcccgtgcccggcagaaaaaccgggaattctcgcaaatacataatcaaagtattccttcatcggcttttgaaaacccgtgtcctcagatacaaacacatctttaaaaaacggatacagaccggagtcgcccagccgcttatattgtgatcttgagacgccgttcgtcacgatgtataaatcaaataaaggactcagccgttcaatcagctcataagctccgtctatcatctggtgcccttcttctaagtattggcggtacgcctgattcatcagcacgccgtcggcttcaaggccgtattctttaaacaaaagggcaaaccgtgtattcaccacttcatcgcgggtcatttcccctcttcaaacgccttccacagcccttgatttaacgctttataacgggcttccacctctgccgtcagctccagctttgaaccttggaacaatttttgaagagcatcggtttctgaagcggtaaaatccagcagcgtattgtctatatcaaataataacgtacggtaatgactcatcgatgtttcccccggttctgctttttttaaccagtataccactcgcggacaagccgaaaaagacacccctgtaagagaggtgtctttttgaattatacagcgtcttctattttcgatttttcaccaggcatgcgcttgccgataccgaacgcataatagctgaccgtcacaatcgccaggaaaatcaccccgacaaccaaagaaatccgcgtatctttgttaaaccacatgccgatcaataccatgagtaagaaagcgatcgtcaaatagtttgtaaacggcgcaaaaggcattttaaacggatgcttatcaagctcagcgcctttcgctcttctgaaaccgagatggctgatcaaaatgacgaaccacggaatcattcccggcagcacactcgcgctgtacacataaacaaagattttcggaggcgcgatgtagttcagcacgacaccgatcacaagtccgattaataccgcaagcgtaccgaatatcggcacaccgctcgaagaaactttcttaaagaatttcggtgcctgtccgttcacgcctaacgtataaagcatacgtcccgcactgaatatcccgctgttgcatccggacatcgcagcggtaatcaccacaaagttaatcagaccggccgccgccgtaatcccgactttcgcaaatgtcgaaacaaacggactgccgagtgagtgaagctcattccacggatatacggtaacgattacgaaaatcgcaccgatgtagaaaattaaaatccgccagataatactctgaatcgcgcttcgcagcgttttttgcgggtccttcgcttcccctgccgtaattccgatcagctcgaccccttgataggccgcaacaaccaaagacaaagcaaagaaaaatcctgaaaaaccatttgtaaagaaaccgccgtgcgaccataaattagataatccgatcgcatgccctccgttaccgaaaccgaagaaaataattccgattccggccacaatcatcagaataatggtgacgattttgatcatggcaaaccaaaattcaaactcaccgaaagattttactgaaattaaattcgccgcaccgagaatggccatggcgataatgccgggaatccatgccggcagatcaggaaaccaatatttcatatacgaaccgacggcgataatttcagacatcccgacgatcacccattgaaaccagttgctccacgccgtcatatagccggctaacggatgtatatacttatggccgaatgtcgcaaacgaccctgtactcggctctacatagagcatttcgcccatcgcacgcatgataaaaaagataaagatacccgagatcgcataagccagcaggacagacggcccggtccatccgatcgtgctggatgaccccatgaataaaccgacaccgatcgtgccgcccagcgcaatcatctgtatatgacgagcgcctaagcctctctttaattctttgtttgccacttcgcttcctcctcttaacagctctgatatatgtgaaataatgaagcagaaggtgcacctgttgaacctaactcactcttcatttcccgcaatattggaaatattctatcttcctatcgttatataatctccaatttccttattccatcataataaattttcgtggaaaatacaattgtttttttcaggcaaacaccttacactctgaaccaacggactaaaaataaagcgctttcatttttattgaattgtgaatattgagataataaatgccgcagcctccgagaaacattatttcccaggagaaacgttttccgccccctatccaatattatttttgctaagcagaatggcgtaaagccttactctcttccattctcccttgtatacgccataatcctgcttaacccggcaaaaatcatgcattaatcgataaatgcctcattcagccgcagcaaaagccggccgaacatttctttttcatcgccggaccaatcgtcaagcatacgatgataccgctcaagacgcatctttttatcagcttttaacctctgtttgccaagcttcgtaatcgcaaacagactgacccgcccgtcagaaggatcggaaaaacgctggatcagctctttcgactccaaggccgctgcctggcgtgataatgtggaaatatccagcttaaatgattcggccaattccttcacacgcgccggcccgaattcatccagctgccgtaataacaaatacgcagccctttccagatgtccgattttacggtcggagttatcaagataaacagctctcctgatgaaagtggtgagttcatattcaattaattcaatcggatcttgttttgacaaacgcctcactccttacattgacaacagcaacattagttgtataatacaaacatatgcacatttactcagaaaacatatagaaagattttgcatacatatatttgtatagtacaaatatatgtgccaaaagtaaagaaacttatagaaacatcaagaaagggggaagctgctcttctccaaagaacagcatcgttgtgaaagtcatacgcatcatcttgcaaatcattattttattcgcattttcctttatcgggggagccgttcagcagttctttcacctgcccattcccggaagcatcatcggtttgatcctgctgatcatatgtttatcggttaagatcattcccgtcaaaatgattgaagacggagccggatttttgctgtcttttcttccgctgttattcattccggccatgacgggcgtcatcaattacccgtcactgttttccgccagcggggctgctctgtttctgatcatcgtgctgagcaccatcgtcacaatgatcgccgcagggtacgccagccagctgttagagcataaagccaatcagagaaaggagaaaaagaagtgcagcaagcatgtatcgcaatccttataattttgttcacggccgccgcctatctggctatggtgaaattatatgtgcgctttccatacccctttctcataccggttttgacgactacgattttcattatcgccgtgctgcttgtttttcatattccgtataaagactatatgatcggcggacaatggatcaattcactgctcggccccgctgtggtggctttggcatacccgctttataagcagcgccgggtgttaatcaagtatatgtttccgatcatcggcggcgtgttggccggtttattctccggaatggtcagcggcctgctatttgcagagctgttcggcatcagccggagtttgattttgtcaattatcccaaaatcaattacgacgcctgtcgccatacagattgcgtccggtatcggcggtgtcccttccatgacagtcgtgttcgtcatgatcgcagggttttccggcgttatcttaggaccgctgcttctcaagtggatccgcatccgcagctcactcgggaaaggaattgcattcgggagcgcctcccatgcgctcggcacctcaaaagcaatggagtacggagaattaacggtctccatgagttctgtttccatgacgctctgcgccgtgttagggtcggtcttcggccccgtcgtagcatggatgtttcaaatttaaagccggcggttctccgtcagcttttttcatgtgcggatcatctcatttccttccattattatgtttcatttgtaagaataatggtaaagtagaaaacaaggagggatttaatgatgactggggcaattccgcaaaagaaactgcttgatgggacaagcattcccgcgatcggcttcggtacatacgctcttaatggaaacaatggcgttcatgccattaccagcgccattgatatcggctaccgtctgattgacaccgcttataactatgaaaatgaagggacggtcggagaagccatccgcagaagctctgttccgagagaacagctatacgtgacgtccaagctgcccgggcgctaccatgactatgacaaagctgtacaaaccatccaagaatctttataccgcgccggtctggactactatgacctgtatctcgtccattggccgaatccgaaacaagaccgctacacggaagcatggcaggcactgattgatgcgaaaaaatggggcctgatccgatccatcggcgtctgcaatttcctgcctgagcacatcgaacggctcgaacgtgaaaccggtgtaaagccaggcatcaaccaaattgaactgcatcccgcttttaatcagcagcagcagcgccaatggcacgaagaacagggcatcgtgacagaatcatggagtccgttatcccgcgccggcgaagtattgaacgatcaaaaactcggacagattgcggacaaatacggcaaaaccatttctcaagtcattttgcgctggcatatccagctgggcgccatcccgattccaaaatcagcatcgcccgagcgccagcttgaaaacatctctgtttttgatttctcccttgatgaaaacgacatgagcatcatcgactcgcttacccgccccgacggacggataaacggccaagacccggcggagtatgaggagttttaaaaaaacacataaagaaaagctgacggcatcatttgtcagctttttcaccttttactctgggatagccaagactgtgaaactttgcagtaaaggctggaaacacacttatcctattataaattgatcagctgctaaaattcttttttatgatatatagctgcggcgatgaaaaatgaaatgatatataagataacgccgatcatgagatatataatcgggacatataaagaaggatttatgtgcaaaaatgacagcggtacttgttctgctgcatacccaacgacactttgcaatccaaaggtagcaaaaagtccccccattgcccctccaatcacgatagcatcggatttttccgggcctatcatgtagagaagaggataaacgattgcaccggcaaagagaacgatgaacgttccaaaagagacaatattaaatataccgtcaattggttcatcagaacccaggctgtatacaaggaaaataccataagatattacagctccgatcacaacaatcaaaagataaaagaaatagtgactttgaacaatatttgttctgctgaccggtaaagtcagaacatacctgtcatagcctgacttgctctcatactttataacctcaagtgcgggcataacgacaaacaaaataatcagcatagcaacaaaacgatgcattgaagcatccccaaaataaaaaatgactgctgataccaatatggccaaccccgtgtatgcaaagaaactccgataaaccaagtaatagttagtcagtaacagacctctcaatgttttcactcctcgttaaaaagacgctgatttcttctatggaaatggtgttggccgttacgccattcggcaatttctgttgatccgatacaagcacactccaataagatccatgattcctttttgctagaacgatatcttcgtcaatctcagccaattgaccttcatcaacgtctataacggtatagctttcaagaaccttatctttctcttcatttaataaaatttcgccatctttcatcataatgatatggctggctatcttctcgacatcagtcataatgtgcgatgaaagtaaaatacctccgttgcttttactcacaaagctttttaattcatttaacagatcatctcttgaagagggatcaagccctcccgttgcttcatccagaagtaataattttgcattatgcgacaaagcaacagctacagataacttcattgacatgccgcgcgagaatgtattcacttttttatccataggtaaagagaaagaatgaaccaaccggtaaaattgatcttggtcccaagcgtcgaacagtttcttaaatacatgattcagctgctttatcgtaaggtgcgcgggaagattcatcgcatcaaatacgaccccaatatcttctttaaactttatatgtttatccagattctctttaccaaagattttcactttacctctatcctgagagattaatcctaatatcgttttaaatgttgttgacttgcctgcgccgttatcaccgataaaaccgacaattgatccggcaggcacattgaatgtaacatcctttaaaacagctttatgaccaaaagatttgctgatgtttctgatttctaaaaggtttgacatcattccactcctatcattgttgtcaggacttttttaagaattgaaccggattattgtaaaaatgttgtgattttcatatctggtctaggtattcataatggatcaggagtcgggaaatacaaaagggattttaaagtcttaagcataatatggaagtgtaatcgattgattaggtttatataatgggatattcatgatgaaaactgctgaggtgtttactttccgatgaggtatacacaaaatgatttactaatgattacatttatggattttaaccggaatgcatctcgtattataaagcaggtgttactccttttcaatatataaaaggggatttctttacaatcgcaaagagtatgcatttctcatttccgcattaaaaaacccctctggctaataaccaaaggggttaaatatattattccacagtcacgctcttcgcaaggttgcgcggtttatcaacgtcacagccgcggtgcagtgccgcatagtaagcgatcagctgcaatggcacaacagaaaccagcggagcaagcgcagggttgacttccggcaggatgaatctgtcgtctgcgtcttctaagcctttcagcgagatgatgcaagtgttggcgccgcgggccgcgacttccttcacgtttccgcggatgctcaggttgacgtgttcttgtgtcgcaagcgcaaagaccggtgttccttcttcaatcagagcgattgttccatgcttcagctcgccgccggcgaagccttccgcctggatgtaagaaatctctttcagcttcagggcgccttcgacacacacgaagtagtcaaggccgcggccgatgaagaaagcgtttcttgaaacagtcaggtactcacgcgcgatcatttccatttcgtccttctggtcgcagagggcttccatggcgtttgccgcaatacctaattctttgaccaaatcaaaaccgatatcaacgccgttgcgttctgctgcaacggacgcaacgatcgcgaggacggcaatctgagccgtatacgcttttgttgatgcaaccgcgatctcaggacctgcgtgcagaagcaatgtgtaatccgcttcacgggaaagcgttgatcccggaacgtttgtaatcgtcagcgctttgtgacccagcgctttgacttgaacaagcacggcgcggctgtccgctgtttctccgctttgagaaaggaagataaagagcggcttcttagacagaagcggcatgttgtaagagaattcactcgctacatgcacttcaaccggtacgtttgcccacatttcaatatattgtttcccgacaagaccggcgtgatagctcgttccgcaagccacgatataaatgcggtccgcttccgccacggcgtcagcgacatcgcccgccacggccagtctgccgttttcgtcctgatacgtttggatgattttgcgcataacaagcggctgctcatccgtttcttttaacatgtagtgagggtatgtgcctttttcgatatcactggcgtcaagctcagcgatataagacgcacgtgtcatgacttcaccgtcaagatttttaatcacggcttcgtcttttgtcacgatcaccatttctttgtccaaaagctcaacgtattcattcgttacttgaagcatagccatcgcgtcagatgccacgacgttaaacgtatctccaaggccgattaacagagggcttttgttttttgcaacgtaaatggtgtctgtgttttcaccgtcaaataatgcaattgcgtaagagccttttaacagagtcagtgttttgcggaacgcttcttctgtgctgagtcctcccgccacaaattgctcgatcatttgaacgactacttcagtgtccgtgtcgcttttcagttcaacgttttcaagatactcgcgcttcagctgaacatagttctcgatcacaccgttatgaacaagtgtaaagcggccgagtgcgctttgatgcgggtgagcgttcaggaagcttggttcgccgtgagtcgcccagcgtgtatggccgattcccgcttgagattcaaccgtgtggtccaccacttcacgaaggtcggcgatgcggcctttttctttgtacacatgcacgccctgctcattcgccacagcgataccggcagagtcatagccgcggtactcaagcttctctaatccttttaacaaaatctctttcgcatcaagctgaccgatgtaacctacaattccacacatattttcttcctcctaaaggtgtaaaaggagacgaagaaagtcaaattacaaggggactttcaatcgtcccctcccacatgtttttttggaagatcatgtgatttccctttgttcggagagtcgcccctccggtttgaagaaatccttacggctgtgatctaaatgaatcagccgggaggcatccgccgaaaattcgataacctccatcctcgtcaactaagccgtttttcgggcgcttagttcgggcgctgtaattataaaagatgcaaacaatcccgcctttcctgcaagtgaaaaacaaaggctgaacaagcttgattttacagcatgtgccaaggacggtcaattattttttgccgccccggcatcatgtttactatcattttatgctgatcgcacttgtcttgttcgctctctgcttataaacttcgctactccgctcccatttctgtccgcacgacatccacgatttttgtgacatattcgtcacaaagctcttttgttctcgcttccgccatcacgcgtacgagcggttcggtgcctgacgggcgcactaaaatccggccgtctccgttcatttctttttccacttcagaaatcacggccttcaccttagcgttttcttctaccttatatttatccgtcactttcacgttcactaagagctgcgggaattttttcatttcatccgcaagttctgaaagggttttgccggacgccttcagcgtattcacaagcatgatcgcggacaaaagaccgtcgccggtagtgttgtaatcaaggaaaataaggtgccctgactgctcgccgccgacattatagccgtcttttttcatcgcttctacgacatagcgatcgccgactgccgtttgaacgcttttgatttcttctttttcaagcgctttgtagaaaccgaggttgctcatcacggtcgatacgacggtatcatccttcagacggccttctgatttcaaatacttcgcgcatatgtacatgatctgatcgccgtcgacgatgtttcctttttcatcaacggcaatgaggcggtcgccgtctccgtcaaacgcaaggccgatatcggcgtttttttctttgacgaaagcactcagcgcttccgggtgtgtagaaccgacgccatcattaatgtttaatccgttcggagacgtccccattgtagatacgtcagcatcgagatcggcaaaaaggtgcgtcgcaatggaagatgtcgcaccatgggcgcagtcaagcgctacatgaatgcctgtaaaatcttcgtccgccgtctgttttaaaaattgcagatacttttgaacgccttcaaaataatcgttcacaagcccgaggtccgcgcctgtcggtctcggcagcttatcttccggttcctccatgagacgttcaatctcggcctcctgctcatcagaaagcttaaagccgtcccctccgaaaaatttaattccgttatcctgtacggggttgtgagaagcggagatcatgacgcccgcctcagcatccatggctttcgttaaataggatacccccggcgtagaaataacgccgaggcgcatcacttcagctccgatcgataaaagtccggcgacaagggctccctccagcatatgtccggagatacgtgtatcacggccgatcagcactttcgggcgctgcttatctttggtcaggacataaccgccaaaacgccccactttaaaggccagctctggcgtaagctcgctgttggcaacacctcttacaccatctgttccaaaatacttgcccattttgtatcgctcctttttcattctgttgaagaagaatcagcgcttgatccgtcttcatcctggtcttgattttgatcctggttttgacttttattctgatcgctgtcagtgtcgtcttcccggttcttgttcttgtctttgtctgcgtctccgcttgtgccgttcttattgccggaatcagcggagccgccgtcatttttatttgaacttgtgtttttcttagaagtcagcttgatcttaaccgtgtcttttgacagggaccatgtgacgttttgcgggccgtttacttcaagctttacagagtgctctccgtcatccaagtccgagacattggcatacagttcaatgtccgactttttcagcgccttaatgttggcgggagagcctttggccgtaatatttatcgcctgcgattcagggtcgagaaactcaatctgctgtgagcctcccagtccgaccgtcttgattgcgacattgtcaaaatcctttttgtcttcactgtccactttaacatgaagcgtgattttttccggtgataccttagtgacacccttaggaagcgggatatcggcattgatatcggtatctttatcaattttgcctaaatcaagagatacgccgtcaataaattcaagtgaatccagcacatcctgcgggccgtaaaccgtcacctcactcggattcgagtcaatgctcgcaacgctcaccccgtccggaagacttcccttcctttcgattttgaaaggaagctttttgctcggactggctacgggaaccgtcactttaatgactgacggttcaacatcaacaggaagtgcgttgccgtctttgtcatagacggtcaccttcacttccttttcaatggtctcatttgcattttcaaggttcacagatgctttgacaagtgaaatgttatcaatcacatttttcgaacctgtaatctgcacgtttttcgggctgataatcggctgctgaggggtatatccctttttcattttgcttttattgtagtattcaacttccacgggaaaactctcagccgttttttcctgaatcgtaaccgtcgtgactgacgggtttatggagatcgtcagtccgtccgatacgtttttcgccttcaattcgaccttatgagtcccggtcttcagcttattcatatcggcgtatatctcaaaattcttcgtctgtctcgcctttttcaccgcgcttgtcgagcctttaatcgtgacatttaccgtctggggcacgccggtgacgacatagttcgcttcatcgtagtatgcttttacaggaatatcagtaagcgtagcctcgtcagtcgttgatgtcggaaaaaaggattcccccggctttttcggagtcggcgcctggttgttgttaaccgcaacgtaaagcagcagcgccaagagcaatgcaatgatctttacagcccagcggttgtttaagaatttatccatttttcttgcccctccagtaccagcggttagaagaagtgtctctggcgttcttcttaaactcggcttcaagcatttctttcagtgcttcttccgtcaattctctgtgaaggtctccgtttctggccacactgatggcgcccgtctcttcagatacaataatggttaagctgtccgtcacttcactgatgccgacagccgctctgtgacgcgtccccagctcctttgaaataaacgggctttcagaaagcggcagataacaggcagccgcagcaatctcgttatttttcataatgaccgctccatcatgcagcggtgtattcgggatgaagatattaatcaaaagctccgagctgacctgcgcattaagcgggatgcccgtctcaatataatcgcccattcccgtatcgcgctcaatggcgatgagtgcgccgatgcggcgtttcgccatgtagctgatcgattttgtaatcgcttcaattgtcttatgctgcgcttcctccacaggggttccgctcctggaaaagaaccggccccgtccgagctgttcaagcgcccgtctcagctcaggctggaatataatgatgatcgctaaaaatccccatgttatcgcttggtccatcagccactgaagcgtgctgagtcccaaatatgaactggccatccggaccaatacgatgacgacgattccttttaaaagctgaaccgccttcgtcccgcgtatgaccatgattaatttatatatcacataccaaacaaggagaatatcaacggcattgccgaggtattgcaaaaatgggatgtcctcaaaagccatttcctcgtcctccaagaattcagtcatttcgttttttccgttatgaattgtgctgcatgagcaatatgtacatcatatagcgtgctcattataccacattttgatttctcaagtgaaatgagccggcgcggcgttgcacaaaaaaagagtaaagcgattatacgctttactcatcttcattcgggtccaaagcgcttacgacgccctgtcccgccgatttcagttcgtaccagacccagtcaaacaattggttaatctcttcaatctgcccggtgacttgtccggctgaggccatgtatttttctccgttgacgacggtcacattgccgtcgacttttccttcaatgaacagcttgccgttttttactgtgacatcgccctttacggtctcgccttcagggacggtgaccgtgtgattctgcacgacaaggttcggctgtttggacacactgaaattgtggtcattatgccagctgttgaaaaaaccgccgcccattaaaatcacaaaaaccgctgcggctgcaatcatcggatgagttttgatccatcgttttacagaagcgcgttttttctcttttggaagattcgccataactttggcagtaaaatcagcaggggccgtgacatgcgatgtgcttcggacgagtgctacggatttctccatttcatgaaaatgccgtttgcaattcccgcatgactgcaaatgttgttttaatacgttttcatcttcaggaaggatatctccatcaagatgcttatgcataagctgcacaatctgttcaggacagctcatttcatcaccccacttaaagatccctcaattgttttctaagagcctctctgcctctgtgtatccttgtcttgacggtgccgacagggatattcagaatctccccgatttcaattaaagagagttcgtcaatatactttaatacaataaccgttctgtacttgtcaggcagctttaaaatctttttctgaattgtgtccgacagctccaatgacaatacggcgtcttcagggagaaccccgtccgcggcgatctgcgaatacatcgtcagcccttctgctcccgctacttctgcgtccagatagtaatcaggctttttcttgcggatgcggtcaatggtcaggttggtcgcaattctgtaaagccacgttgaaaactttctgttgatatcgaaactgtcgatattgacatacgctctgataaaagcttcctgcgcaatatcttccgcttcgtgaacattgccgagcatgcggtagcaaagctggtaaatcttatctttataaaggtcaacgatttctgcaaacgcattttgatcgccttttttgacttgcttgattctttttttaatcaggttttccatgttttatcttacctctgcccttcaccggtctgtatctatacgttgattgttttaaaaggtttcatttttttattacatttattttaccaaatttcaggcagggtgtagatggaaaatacagaatatactgccttaacagcagcttaaaaatagtatatctgatgaacaatcaaaaaccgaaacaaaatgccgataaaaaaagacacctttatgcaaaaggtgtctgagactgggctagctggattcgaaccaacgcatgacggagtcaaagtccgttgccttaccgcttggctatagcccaaaaatggtggagggggcagattcgaactgccgaaccctgagggagcggatttacagtccgccgcgtttagccacttcgctacccctccgtatttttttggaaaacagtgccggccagaggacttgaacccccaacctactgattacaagtcagttgctctaccaattgagctaggccggcaaatatggtggaggatgacgggctcgaaccgccgaccctctgcttgtaaggcagatgctctcccagctgagctaatcctccatatgacccgtacgggattcgaacccgtgttaccgccgtgaaagggcggtgtcttaaccgcttgaccaacgggccgctgtgtccgcgtcgagctgacaaaagttattatatacaggttgtaccccatttgtaaagagaaaaattattttttttattttcaaacttttttacccgttttttaactgaaaaactcatccctcctctcttatttcatttatgatgaaagtatcaaaatattgaagggaatggacacagatgatcttagtcagctcttgtctcggcggtatcgaatgcagatataacggctctcacgccgcttcggaaaaaatccgcagactcgtagaagaaaagaaagctgttatggtctgccccgaacttttgggcggcttcaccactccccgcgaaccggcggaaatcatcggcggcacgggtgaagacgtgctgaacggaacggcaagaatcgtaacggcatcaggcgaagacgttacagctttatatatggacggcgcggaaaaaacgttagcatacgcaaaagaaataggcgccgcaacggtcatccttaaagaaaacagtccgtcctgcggcagcagctttatctatgacggcactttctcaggaaaaaaaatactcggagacggcatcacttccgctcttttaaaacgggcaggctgccgtgttctatcagaagatgaattggatcaattataaaaaaggagagtagatatcatggatgtagccctgtccttttataaaccggagcatgcagacgggctgaacgggtttgtgctgagtgaagaagataaaaagttcacagctctgccgatagatgtcctgccgcaggcgcttgtcatccgggatcgctacccgacagtcattttaaaagaagaccgccccgtcggtttttttattttacatacctcaaaagaaaccattgctccgtattcgaacaatgtgtctgccattttgctgagtgcgctgtcattacatgcgccgcatcagggaaaaggttatgccaaacaagcgatgctgcagctccccgcttttgtcgcaaattactttccttggtgtgatgaaatcgtgcttgctgtaaaccatcgcaatcaacgtgcaaagaacctgtaccggtcttccggttttattgacaaagggcggcgcaggatcggcccgatcggtgaacagcacattctgcatcattttttgtgaaagcgcttgattattcatctcatccctgccgatttttcttgaaacatctattcagaagcccatatacttcaagtattaacgacttgggagggtacaatcatgacagaccggcttaacattcacagattgaccacagaaaccagaaatccgcagaccgcttcaatccatcaggcagacacaatggaaattctccgcatcattaacgaagaggatttcaaagtggctgaagccgttcagcaggtgctgcccgatattcagattgccgttcaattcgcccatcagtccttacggcgaaacggcaggctgatttatgcgggagcgggcacaagcggcagactcggtgtactggatgcggttgaatgcccgcctacatacagcgtaagtcccgacaccgtcatcggtctgatggccggaggggcagacgcctttttgcaagcggctgaaggtatagaagacagcgaggaaaccggcgctctcgatctcaaaacgatcgggcttaccgcagaagacaccgtgatcgccatcgcggcaagcgggcgcacgccgtatgcggccggtgcgctgaaatatgcaaaaacaatcggcgccaaaaccgtcgcgctcacatgcaataaggactccttgatcagcacctttgccgatcacagcatcgaagtcattgtcggccccgaagtgattacagggtcaacacgaatgaaagccgcgacggcacataaaatgattctgaacatgatttccacggccgtgatgattaaaagcggcaaagtgtacgaaaatttaatggtggacgttcatgtcagcaacgaaaaattgaaagaacgcgcaatcggcattatccaaagcatcacgggcgttccgtacgacaaggcaaaagaaacgcttgaggccgcagacagccatgtcaaaacggcaatcgtcatgctgaagacgaattcggacgaaacacacgcgaaggcactgctcaaagaatcagaaggattcattgataaagccattgaacagcacgtttcaagagaaaaagaacgctgatcgttctttggagaaaaatattgtgcttttacgagcccgcgccgttttcatgttcggcgcaggcgcttttaggacgcgtttcaggcatagctccccgggaaaaatcgtacagaaaaaggaggatctccatgagcaaagaggcattttatcagtcactggccaaagatatcctggacaattgcggcggttcatcgaatatttcaggctttacccactgtatgacacgcctgaggattacacctttagatcgggacaaaacggatattgaggcgctgaaacggcttgacggggtaataggcgtcgtcgaagccgaaacactgcagatcattctcggcacgggtgtcgtcaatcatgtcgccgacgctttcgcaaaacttatgccatccggaaaaaacattgatttaaaagaagccgcctcacggaaaaaagccgatctcaacagaaaaaacaccacacccatcaaattgtttctgagaaaaatatcaagcatcttcattccccttattcctgcactcattgcatcaggtttaatcaccggtattacgaaagccgtcattcaggccggctggctcccgaaagaatcccaaatcgcacttattttaacggttatcggttcaggcttgttcgcttacctcggcgtccttgtcggcatcaatgcggcgaaggaattcggcgggacacccgcgatgggcggccttgcgggcatattgatccttaaccctgagatcgccaatatcagtttgttcggagagaatctgctccctggcaggggaggattaatcggcgttcttttcgctgcggtttttatcgcttataccgaacggtttatcagaaagtacgtccatcaatccatcgacattatcgtcacgcctacattgtctttacttatcaccgggctggtgacatatgtcgtttttatccctgcaggcggttttatttctgatctgattacatcaggtttattgtcgctgctgaatgtcgggggagtgctctcagggtttgtactgggagccgccttcctgcctcttgtcgtcaccggcctgcatcagggcttgactcccgtacatttggaattaatccgatcaatcggagatgacccgcttcttccgattctcgcgatgggaggcgcgggtcaagtaggcgcggccttcgccatctttatgaaaacaaaaaaagcctcattaaaaagagcgatcggcggcggacttccatccggtctgctcggaatcggagagccgcttatcttcggcgtcacgctcccgctcggccggccgtttttgacggcgtgtttaggggcgggaatcggcggcgcctttcaagcccattttcaagtggcgactttttcaatcggtgtctccggccttccgctctcgtttctcgtacagccggctcaaatcgttttgtatatcatcggtctcttcatctcttacgcggcaggctttgtcttcacttatgcgttcggatttaaggatgacatggctgctgaatttgaataaaccgggagggatcagaatatgaaaacactgacagccgccatactcacaatggtcatcagcctctcttttctgccgcagcacaaagccgaagcccaatccaaattatacgacgcagcaaagctcagaaaggttgatcaaatgattgaaaaagacatcgcagcaggattccccggagccgtcctcatcgtcgtaaaggacggacgggtgatcaaaaagaaagcatacggctacagcaaaaaatatgacgggaacacccttttatcccgtccgaaaaaaatgaaaacatcaaccatgtttgatttagcttccaatacaaaaatgtacgcggccaattttgcactacagcgactcgtcagccagggaaagcttgatgtgtatcaaaaagtctcggcttaccttcctgatttcaaagacagaaaaagcgatccgattcaagaaaaagaccgtatacgcgtcatcgatgtgctccagcatcaatccggtctgccggcaagcttttatttctatcagccggacaccgcaggccctttatattcacaagaacgggataaaacaatccgttttctcacccagatcccgcttgaatacaagccgggaacaaaacacgtatacagcgatatcggttacatgattctcggatgcatcattgaaaacataaccggaaaaacccttgatacctatgcggaacaagaactgtacaaaccgctgaaactgacgcacacactgttcaatccgctgcaaaaaggttttaaagaaaaagcattcgcagctactgaacgtttaggcaacacacgtgacggagtcatccatttccctcacatcaggacatatacgctgcagggggaagttcacgatgaaaaagcattttactcaatgggaggggtgtccggtcacgccgggctgttttccagagctgatgatatggccgtccttcttcaagtcatgctgaacagaggcagttataaacacgtttctctcttcaataaaagaacggccgatttgttcacaacggcggcatcctctgatccgactttcgctctcggctggcggaaaaacggcagcccggatatggagtggatgttcggaccttatgcaagcaggcaggcatacggccatacgggatggaccggcaccatcacgattattgatcccgcttataagctggggatcgcacttttgaccaataaaaagcattcccccgtcgtcagccccggtgaaaacccgaatgtttttgaaggggatcttttcccgaccggaagctacggcagcgtcataaaagcgatttatgaagccattgaatgacaacccatgtcttttgtccaaactatgacggcaggagggcaccatcatgaaacttttcatctcagctgtattactgttgttcattgtattcggcacgcatcatgcatcaacaaaaccggacattccgtcacaggcggaacaagcggtatcccgtatgacgttagatgaaaaattagggcagatgctcatgcctgattttcgaaattggcaaaaaaaggggcagtcatcacctgaggctcttacccaaatgaatgacgaagtcgcagggcttattcaaaagtaccggttcggcggcgttatcttatttgcagaaaatgtaaaaaacactgagcaaacggtacgcctgacagatgcctttcaaaaggcgagccctgacattccgctattattaagcattgatcaggagggcggcatcgtaactagacttggtgagggcactcatttcccaggcaatatggcgctcggggctgctagaaaaacagcctacgcgtcccagaccggcgccattatcgggaaagaactgaaagcactgggcattaatacgaatttcgcgcccgttctcgatatcaataataatcccggaaaccctgtcatcggcgtcaggtcgttcagttcagaccgtgatctgacagcttccctcggccttgcctcaatgaaggctcagcaaaagcagaatgtcgctgccgccgtcaaacatttcccgggacacggcgacacggatgtcgacagccactacggtcttccgcttgtcacccacaatcaagaaaggctgcgtcagattgaactttatccgtttcggcaggccattcaggccggagctgatatgatcatgacagctcatgtgcaatttcccgcttttgacgatacaacctataaaagcaagctggacggttcagacatcctcgtacccgccacactctcgaaaaaagtgatgactcatcttctccgtgaggaaatgggatttaacggcgtcatcgttacggatgcattaaatatgaaagccattgccgatcatttcggtcaggaagaggcggtcgtcatggcagtaaaagcaggagtcgatattgccctgatgccggcccaagtgacatcgctgcaaacggaaaaccgctttgcccgggttcattccgcgttaaaaaaggcggtacaaaaaggggatattccgctgcagcaaattaacaaatcagcggaacgcatcatttccctgaaaataaaacgagggatatatcccgcaccgaaagagacaaatctgaaaaagaagattgcaaaagcaaagaaaaccgtcggcagcaaaaatcacctgaaagctgaaaaacaaatcgcggaaagatccgtcaccgtcttacaaaacaaaaaccgcacgctcccattcaaaccgaaaaagaacagccgcgttctcattgccgctccttatgaagatcaaacagcggcaatggaacaaaccattcggcagctcatcaagaagaaaaaaatccggccggtaaccatcagtaaaatgaacttcgccgagcgcacatttcatgatgaacacaaaaagctggtatccgacgcggattacgtgattacaggctcctatgtcgtaaaaaatgaccctgtcgtaaacgacggcgtgattgacgattccgtcacagatcccggcaagtggacgaccgcatttccgcgggccgtcatgaaagccgcacaatcgaaccaaaaaccctttgtgctgatgagcctgcgtaatccttacgacgccgcgaattttgaagaagctgaagcccttatcgcagtctacggctttaaaggatatacagacggacaattcctccagccaaacattccggcaggcattgaagcgatattcggacagacaacaccgcaaggcaggctgcccgctgacattccttcagtcacgcatccgggaacgacactgtatccttatggtttcggtatcaatctgaagaccggaaaaccgctttaaacaggagggctgattatgaaaacacatacggctgcacttctcgccggacttgtcgtcatcagtgctatgacggcagtctcggcggcttctgacagaaaccttcataccgccaagaaaccaagcatccaaacaggcatcgaccgcctgctgaaagattataaacaggaactgaagggaaaaagggtcgggctgatcaccaacccgaccggtgtgaacgcatcattgaaaagcagcgttgacgtgctgtatgaggcgccagacatccgcctgacggcattattcggaccggagcacggtgtccgcggcgatgctcaggccggagacaaagtcacatcctatatagacgaaaaaacagggcttcccgtctacagcctatacggggagacgaggaaaccgacgcctgacatgctgaaagatacagatgtgctgattttcgatattcaggatgtcggaacccggtactacacctacatttatacaatggcctatgccatggaagcggccaaagaaaaaggcattcctttttatgtcttggaccggccgaatccgcaaggcggacgaaatccggacggcccggttcttgaaccggattacgcttcatttgtcggactgtatccgatcccgctgaagcacggcatgacgatcggtgagcttgctcttttattcaataaagagtttcatattggcgctgacctcaccgtcgtaaaaatgaagcgctggaagcggacgatgacgattgaagataccggtctgccgttcgtcctcccttcgcctaatatcccgaccccggacagcatatttgcatattcggcaacaggactaatcgaaggcacaaacgtatccgaaggaaggggcacgacaaagccgtttgaacttatcggcgcgccttatatgaaaagcaccgagctcgaagaacgcctgaacagtctcaagctttcgggcgtcaccttcagagccgcttcattcatccccagcttctccaaacaccagggcaagctgtgccacggcgtacaagtctacgtaacaaacagaaacacatttgaagcggcaaaaacagggctctccattctgaaaaccatgcatgacttatatccgaatgacttttcattcttgccgacaggctcttttgacaagctgatcggtaacggctgggtacgcaaaaaaatagaaaaaggcgcttccattgaagacatcaccggcacatatcaacgccggctggaccaattcaaaactctaagaaaacaatacctcatatactgacaacattcgtgttacacgtgtaacattttgacgcatttcacatttccgctttttataggaaaacattcatttatttggtacaatttaaatgataactgttatcatttaaatgaatgtttcctaaaaggtggtttctcatgaaaaacacattattctttcagcccattgatatcatctccgtgaaaaaaacagccgaccttctgtcagagcatcagctcactgattcccccgtattgatctttcatgtgaaaggcgagggacaaattgatatcggaacagacagctttccgctgcagaaggaaacgctctacatctgtccttgtgatgagacattcaatattgcccctatatcgtcaggcggcatccatttgtatatcgtcagactccgtgttttctcctattcctcagatgatgaagcgatgcttccggataacggggaagacatcttccacggacttcagcaaatgaatttacaaacggttgatcatttgacaagccggcttcaatcactttctgaaaacgtgcgatcggcggatggattgcagaaaatgaaatataccgccgactttcagcagctgatgtacgacctttatgccgcaaaagtatgccatcaaaataatacgaaagcggcgatcgaacagacaaaacaattcatacatgctcagtccgacacaaaaatcacgctcacccagctcgctcatatggcgggaatcagtcccaagcattacagtgaaacctttaaaaaactatacgggcagagcgtaactgaatatatcacagacatccgcataaccaatgcgaaaaaactgatggccaaggcaagctgcaaactgcgggaaatcgctcatcaaatcggctaccaggacgaattttatttcagccgcatctttaaaaaacataccggcagctcacctacaagctacatgaaaaaaaggcgcacaaaaatggccgcgtacggaaaagaaacgatggggcatctgattcctctgcatcacgtgccttacgctgcggcgctgcacccgaaatggacggcctattattacaaacaattctcttccgatattccggtccacctgagcgcttaccgctataatgcaaattgggaagagaacctgcatacgctgtctcaagctgccccggacattattttcagtctcgattctgtcagtgaagaagaaaaacagcgcctgaatgacatcactgaagttttttatcttccggctcaagagaattggagagaccagtttcttcgcacagccgcatatctgaatgaagagcaggaagcgcggcactggcttaaaacttatcaaagtctcacccattcagcgaaagatgctcttaaacatgtgcggcaccagcggttcttatttgtccgtgtatataaagaaaatatgtacatcgcccataacaacagtattgaggaagtcttcttcggtgatttggactttgcctccgcaaaaccggaatcatttgctcctgacgaaaagatttccttggaaatgctggcggattgccaggctgactgcatcatgcttttcacttgtaaagaaccggaaacgcttcgctattttcagcggattcagcagtccgggatatggcagaaccttagtgccgtcagcaataaacgcgtgtttcccatttcatctgacccgtggattgaatattctccaagcggacatcagcggatgatcgagcaaagcatttccattttatccgaagatcgtccatggtaatgccggaaattatccatggtcttatccctattcattctctataattccaattgataatagttatcaattgaacaggaggaacaatagatgaagaaattggcattcgctttcatgattttgcttttggctttcacggccgcggcttgcggaagctcagaaacaactgatacagcaagtaaaggaaaggacgcttcttcagataaaaagaaaatcgaatatctcggaaaaacatatgaagtcaaagcgccgactgacaaaatcgccattacaggcagcgtagaatcaatggaagacgccaaattgcttgacgttcatccggcaggagcaatttctttctccggcaaattcccggaactgtttaaagatattacagataaatccgtatcaacgggggaaaaaatgcagccgaatatggaaaaaattcttgagctgcagccggacgtcattctggcatcaaccaaattcccggaaaaaacgttgaaaaaattgagcggcaccgctgaaacgatccctgtctctcatatctcatcaaactggaaagaaaacatgatgctgctcgcccagcttacagataaagagaaaaaagcgaaaaaaatcatcgcagattacgaacaggacctgaaaaagacaaaaacaaagatcaacagcaaagcgaaacagtcaaacgcgctggtcatcagaatcagacaaggcaatatttatatttatcctgaacaagtttatttcaactccacgctttacggtgatttaggcctgaaggcgccggacgaagtcaaagcggcgaaagcgcaggaactgatttctcttgaaaaattaagcgaaatgaaccctgaccatatcttcgtacaattttctgatgacgaaaacgcagataagcctgacgctttgaaagacttagagaaaaatccgatctggaagagcctgaaggcagtcaaaaaagaccatgtatacgtcaatacgattgatccattagcccaaggcggaaccgcgtggagtaaaatcagcttcttacaggttgcggctgacaaattgactcaagactaataaagagtaggtttttcacatgtatgcaaaacggcggacacacattattatcattgcttcaccgattgctattgttctgtcactgctcctttccgttttatacggcgcaaagcagcttgacatccataccgtgttctccgcattgctgcactttaatccggagaataccgaccatcagatcatatggcattcaagaatcccgagggctgccggtgctatgtttatcggcgccgcccttgctgtttccggagcgctcatgcagggaatcacacggaactatctggcctcgccttcgatcatgggtgtgtcggacggctccgcttttatcatcaccctttgcatggtattgctccctcaatcgacatccattgaaatgatcatctactcgtttatcggttccgcattcggcgccgctcttgttttcgggctggcctccattcttcccggcggttttaccccggtgcagcttgccattatcggaacggtgaccagtatgcttctcagcagtctgtcggctgcgctttcgatttattttcaaatttcgcaggatctcagtttttggtacagtgcgagactgcatcaaatgaaccctgattttttgaaactggccgtcccgttttttgcgatcggaatcattacggccatgattctcagcaaaaaggtcactgccgtatcattaggagacgacatttcaaaaagtctgggacagcagaaaagaaccatcaaactcatggcgatggcggctgttgtcatattgaccggaagctcggtggcgctcgccggaaaaattgcctttgtcggtttagtcgttccgcacatcacacgttttctcgtcggatcggactacagcaggctgatcccatgcgcgtgcattatcggcggcgtctttctgaccctttgcgaccttgcgagccgattcatcaattatccgtttgaaacgcctattgaagttgtcacttctatcatcggtgttcctttctttctttatttgattaaaagaaaaggaggggatcagcgtggtgcgtaaaatggcaggaatttatatcattctgattgctctcatattgctcgtaagctatttcagcatgacaagcggttctttttccgcaaagccgggtgaactgctcagtacgcttttccgcatccatccgaatccgcaatatgacattttgctgtttcagctgaggctgccgcgcatagtcatggctgctgccatcggactcggattggggatagccggagctgttattcaggccattaccaaaaacggtcttgccgatcccggtattttgggcattaatgcaggagccggagcgggaatcgtcacgtttatgcttctgtttcagggacaatctgaagcgacggcacttgcctctgcgatgggtatgcctgtcttcggcctcatcggaggactgatggcggccgtgctgatctatattttcgcctggcaccgggggcatctggaatcgggcagaattattctcgtcgggatcgccatgaattccggattcagcgcgctgtctttatttctatcattaaaaatggacccgcaggattatgagatggcgatggtttggaaaaacggcagcatctggtcggcaaactggatgaccattacggcaatccttccgtggctgatcttgttcattcctcttcttatggcgaaaacgtcattgcttgataccattcgtttcgatgaggacacggtgaaaagcctcggtgtttcaaccaataaagaaaaaaccattttgctcattgcctgcatcgctttgatcagcgcatgtgtaaccgcagcgggcagcatggcatttgtcggactgatcgcgccccatatttcccgcaggctcgccgggattgagcacagatactcattaccggtcagcggactggtcggtatgctcctcgtcatatccgccgactttgcgggcaaattgttctttcagccttcagaagtgccggcgggaattatccttgcaattctcggcgttccttatttcttttttcttctgtttaagcaaaaaaaggggatggacgcatgagaggcacccttacagaacacccgataaacggaagggaatgcactgtgtatcttcctccttcctattcggttcaaacaggggctttaccctgtgtgtacgtacttgacgggggttctttgtttttagaacagatagataagcttgaatcccaatttacgaacggaacacttcccgaattgattttcatcggcatcaaaccggctgacagactcgatgagtacacaccgtggcccgcgccttccctgagccctgcgtttcatgatttcggcggcaaagggaggctctttctcgaggagctgacaaatgtcattattcccactgttgaagatacgcatcacatttctgcgcatccggaaacgagaggactgatcggtgcgtcattaggcggactgttttcgatatacgcgatgctgcaaaagcctgaaatattcggcagaatcggctgtatttccggttccttctggtatgaaaaatcagcagattatgtccgctccgcacctttgcggccggcacggcagcgtatctttatgtctgtcggcagccgtgaagcagagcaaaaatgtaacatccaaaacaccatgatcggacaaaataaagacgtgtacaaaagcctgaggcaaaaaggcttttctcaatctcagctctcattcacgatcgaagagggcgccgtgcaccatcaagaagcgttcaaacgacaatttaattcagcactaagctggctgtacggaaaaaaccgctcacgtgactgagcggtttttttcatacttgatcacgaccggcttaagctcaaagcgtctcagcaaatagccgaacaaagcggcaaggatttgctgaaagagcatcccgatgacgaccggaaccgccacttgagacggaaagaaagacacggcgagaacggctccggcgctgatattgcgcatgccccccgtataaatcagagacacgatttcatcctggctccgcttcatcagtcttccgatcagccaagccacggcataacccgtcatggcaataaaaaataccgtgcctgcgatgcccgcaaatttgatatccacgtgcgtgacatacggcgcgatttccgaactgttaatggcaatgacaatcatcagacagatttttgaaaaaggagacagtgaccggcttatcgcctgagtccttaccggcggggaaaactggttgaccatcatccctgcgatggacggaatcaccaccatctccgccagccctttcatcatgccccacacatccatctgaacattcgccccggccaggacagacaggcttaatggtacgataaaaggagaaagtacggtatcaaccaggataatagacagcgtcaatccgacatttcccttatacatcgcagcccaaatcaaactcgtaattccggtcggaatcaccacacccataatcagccccgtcacagttaaagggtcaccgctgaaaatcagatggccgcttccccatgcaaaaacaggcatgaaaatatgcagaacaaacaatgccatgatcatcgggagcggcttctcgatactgcgcttcagcgattgaaaattggcactcagactgcccgtaaatgtaataaatgcaaatatccacggcacagcgccggccatccagctgatatgctgagataacagcacacccgccgccacactagacggagtcaaaagcggcatgattctccccaacacttggttcaacttctgaagccacatcatatgcaagtctcctatatacggttttcaagtctcattcattataacaatgcacaccggcaaatttaaccgaaaaaaagcccggatatattcatccggacttcacaaattctatgccatttgtttcattaaatctcggcttttctgatttaatccctttaattcagcctcaattccgtattctttacatttggcgacaatcttctcaagagcagccgctccagaatcatcccacacgtgggcatcagtcaaatcgatgataatccgtttcacgtcttcatcataaacgatggcattcatcagttcagacacggaagcaaaaaagatctgtcccgttaccttataagttctgacatctttctgttcggaatgtgacacaatcttcagcttagaaattttcgccgtaaaaaagatcgcgcttagcagcacacccgcgaaaacacccttcgataaatcatttgtcagaacgaccgtcacgacggtaatcaccataacgatcgaatcagtaaggggcgctttccgcaaacctttaatcgatgaccagtcgaacgtgccgatggacaccataaccatcacggccacaagcgcagccatcggaattttcacgacgataccgcttaatacggcaattaaaaacattaaaaacgctccggccgtaaaagccgacaaccggccgcgaccgccggctttcgtattaatgacagactggccgatcatggcgcatccggccatgcctccgaaaaacccgttcacaatattggcgatgccttgtccgcggctttctttgttcttatcactatccgtatccgtcatttcgtcaatgatctgggccgtcagcaatgactcaagcaatccgacgaatgcaagcgccagtgaatacgggaaaataatccgcaatgtctcaaacgtccacggaacatccggtatcaagaaatgcggaagtgaacttgtaatcccgcccatatcaccgaccgtgcggacatccgcatggaagaccaccgcaatgatcgtcatgacaataatcgccaccagcggagacggcacagccgtcgtaaccttcggcaaaagatatatgatagccagtgatccgacaagcatggcgtacatgacccatgaagctcctttgaactgcggcagctgcgcagaaaaaatcaagatcgccaaagcattcacaaatccgatcatgaccgaacgcggaataaatttcatcaatttcgctatcttactgacaccaagaataaattgaataatacctgtcaaaatggttgccgcaaacaaatactgcagcccgtaatcagccaccaatgtcaccatgacaaccgccattgaacccgtagcggctgaaatcattcccggtctgccgccgaagatagaaataataatcgcgatacaaaatgatgcataaagcccgaccatcggatcaacacctgcaataattgaaaatccgatcgcctcagggatcagagcgagagcaaccagaataccggccagaatgtctttacggacattcccgaaccattgctgctgtaacgtataatctttcaaatgataacgactccttttcactataaaaatccgcaccttatcagttggaaacattgatttttatctggggaatatgaggcaagcttacggggaaaaggggacacgctcagagtataatgtcttgaggaaaggaatggttaacaaagagtatcatattaaactttaaagaaatgtgcaagaccgtataaaaaagaaaagaaaacggctctcactggagccgtttccgcttttataaaagttccggatcagacacaagaatcgtttttattgcgctgatatcctttctttcttttgtcaccgggtcgatgcccatgagatgatcaatggcttcttcataattcttcagttccgtcttttccgtaataaaatcatagagctgcggaaggtcggatgcacatgctaacgcagcctccatgatctgacgggcttcacctgtgcccacaatcgttacgccgtttgacagcagctgatacggcctgactgtcatctcatacgtatcatcaaagcccatcggcacgattctgcctcccttttcaataaaaggataagcccaatcaagctgattgccgatcgcgtcaaaaattacatcaaattttcttccttgattaatccgtttcacttcatccacggttaatgcttcagggtggtagacataatccgatatccggctcgccgcctcgcttcggaaactgcctatttcagtcgcaaccgtcaatcgcgccagttttttcaccatcatttgcacaagcagtccgattggccccgaccccaaaaccaagaccgagtcctccggctgaatcgaagctttgtccacaacattcagcacacaggagagaggctcaaccaatgtggcccgctcccattccattgaatcgggaattctgtacatgaacctgtcttctccgacgtaatattccgcaaacgttccgtgcgccccgattccgagctgccaatcctcgaaggtttcgcaataacacgtcagccctctccggcaataatgacatttcccgcaaaactgcgtaggatctatcacgacgcggtctccgacttttacatttgtcacgtccggtccgatttccacgaccgctcccaccgattcatgccccataatcatatgatgggttgcattcatttttcctttcagcacatttaaatccgttccgcagataccggtgccgaaaattttcactttcacatcattggatttccgaatttgaggctcgtccacctcttgatattcaagcttatcattaggagtccagaccaacgccttcatatttctcttcctttctgccccagcggatttggtctaacaatgtttgatgaagctccttcgttgatgccgcaatacatgattgctggttctgataacttaaatctgtcagaagcgtttcgtccaaagaccggccgtatgcatccgtaatgaccactcctgctttcttcgccaaaaagacgcttgcggcaatatcataaggaaacaaatgcagcacctctccgtttccgacctgctgaaaatctgaaagcagcttcggatcatctttcagcagacgattgccgatatccacataagcatccatctgccccgtgataattcgtgaaatcgaataagaagcgctgttgaaaacaaaaaccccgccattattggctgaccggtcaatcagatgaccgtatgcatccgtcatcagctgtgccggatgcccgttaaactcaaggctccaaaacatatttttaatatcccgcacttcgctcaaattcggcaattctccctgatacccctcaaactgaatggcgtcgctgtaaatatcaccgtacatgtaagcgcccgatttcaattcaagcaaaaaagcaaattcgatatccttaatctttgcgtttggcttatacgaagcaagcgcaatcgaaatacacgacatttcaagccccgcggcggccggacgcgttccgtctatcggatctacaattaaaatatattgcggatcttctccaatcagcttcaggccgccatcctccgtgtaaaaagcaaccggatggcccttatcttgaatataatccagcaccgcctcctcagcagcggcgtctatgttaaattgggcgtcgcctcccggagaatagccgtttacgagccggtttttcagcgtgcctttttgacttttcaccttatgataaacaaattgtccaagcccgatgatatagtctctcacttgatttcctccaatagcttgcgaagtctgtagcagagcacttctgcttcactaagtgtaatagttaaaggcggtcggattttaaaaacatttccgaacccgtaacgggatgtccggagaatcagcccgtaatccattgcccgttttgcaatataattggtcagctccacatccggttcattgttctcttttacaatctccacaccgatcataagaccgacgcctcttacctcagaaataaaagcgaaatcctctttcatcgtttctaagcgatccataatataatgaccgaccgtcgttacattttccaaaaatcccggacgctgcatgatatctatggttttacacgcggcagcggcggccatcacatttgagccgtacgtgaaggagtgcgtataccccggaagcccggtatacttgtcctccgtcagagtggcggcgacttggaagcctgtgcccccgagcccttttgctaccgtcatcatattaggtttcacatcgaagtggtccgcggcaaacattttgcccgtccgtccgaacccggtctgaatttcatcaaaaatcagggcgatatcgtgttcatcacaaagctgtctcagctgtttaaaatactctttaggcggaacgacgtttccaccgtttccggatatcggttcaataatcatggcggcaatttttccattgctcgcatactcaataaaatcattaattctttctacgcacagcataccgcatgaatcaggtttctgattataaaaacagcggctgcaatacggatcggggacttgaaggccaaaagaaatttgcggcgggaaaggttcttttctgaatgagttgccggacaaagcggaagtcatatacgtttgtccgaggtggcttcgaaataaggagatgacatcggtttttccggagtaatactgagccattttaatagctccttcatttgcaccggaaccgctgctgactttagggtgtacttttgtgagattatcgggggcgatttctactagtttttctgccagtttatttacggcgtctgtttgaaaagatgatgtcacatggatcagcttatcggcttgttctttaaccgtatcaatgacttctttgttaccgtatcctaaattcaagttaaatgtggcagaagcgcaatcaatgtactcattcccctcttgatcgtacaggtaaatcccttctccgcgctccattactacatcgtcaacactgtaatacaagctgtctggattcgtgatttccttcgttcccacaaataccacccctatgaaattattagaatttcgctttttatcgtattaattattgaaaatattgtcaacgatctttcttgtaaaaaatgttaacaatttgttaacgttaccataagggatgtacgagaaaaagttatgtgatatagtaacaatacttggattttttgtaaaaacgtcatgtcatacgagtagagagaaatattattttacgaataaggagataaaatgatgaaatctcgtctgctgtggataagctgtttttcttatggatcgattgcttttacacttgttattctgggagccgtactgcctgagttactcacacattattcacaaagctacagtaatggcggtgtattggtattctctcagttcatgggctttctcatcggtgttattggcatgccatacatggtgaaaaagcttgggcgcaaaaacgtcgttatctttggcctggcactcatcagctgcgaaatgttcatcaccttcctgccgccctggccgctgctctttcttctcgtcagcatcgcggggcttggcgccggattggtggaatcctgtgtaggcacgatcatcctcaccgctattaaagaaagacaggctgtggccatgagcaagatggaagtggcctacggattaggcgcgcttttcatgcctctgctctcaggctttcttatcaacaaccacatgtggacaattgcttttttagtattagggttatccagttttgcacttttaatcgcatggaagcagatgagtttcggcagtattgatcagcttctcatccgaaaagaggtctcttccgatgacactaaaaaagaaagcaccggttatcggtcacacggattgctgtttattgccttggcgggggcttacttcttcttttacggaggcagtgaagtttcaattgtacattttatcccctccattttctctgagaaatgggatatccccaactctttggcaacgataacagttacagtgtattggacggggatgatcatcggaaggttactaacaggcccggtatcagaaaagctgacatatcaccgttatcttcgtctcataagcattggcggtctggcagcacttaccgtattagcactaagtaaaaacgtatggttcggctttgccctttgcttctttttagggctgttcatggcaggcatgtttgcaatagccctaatcatcacgaatcatttttatcccggaaagacagaaacgactaccagtattctgctcgcttcaaacggattaggaggttcactccttccgatcgccgtcggctggagcttagatgaatatcccgcacaaactgcgttctggctgtttactgcactgatggtccttatgctgctgattgtgttcagtttaagaatactcgagacaataaaatcaaacaatcttcaaaatcacaacagcaaagcaaaatcaatgtaaacaaaaaagctaatgcctttgaaaggcattagctttatatatctatgtgatctttcaaataaaaaaaccagttcatcatgaactggtttaagacagcttggcggcgtcctactctcacagggggaaacccccgactaccatcggcgctgaagagcttaacttccgtgttcggcatgggaacgggtgtgacctcttcgctatcgccaccaaaccattgagagtgttctctcaaaactagataacagtaagcatacattcaaattggttaagtcctcgatcgattagtatctgtcagctccatgtgtcgccacacttccacctcagacctatcaacctgatcatctttcagggatcttacttccttgcggaatgggaaatctcatcttgagggggcttcatgcttagatgctttcagcacttatcccgtccgcacatagctacccagcgatgcccttggcagaacaactggtacaccagcggtgcgtccatcccggtcctctcgtactaaggacagctcctctcaaatttcctgcgcccgcgacggatagggaccgaactgtctcacgacgttctgaacccagctcgcgtaccgctttaatgggcgaacagcccaacccttgggaccgactacagccccaggatgcgatgagccgacatcgaggtgccaaacctccccgtcgatgtggactcttgggggagataagcctgttatccccggggtagcttttatccgttgagcgatggcccttccatgcggaaccaccggatcactaagcccgactttcgtccctgctcgacttgtaggtctcgcagtcaagctcccttgtgcctttacactctgcgaatgatttccaaccattctgagggaacctttgggcgcctccgttaccttttaggaggcgaccgccccagtcaaactgcccacctgacactgtctccccgcccgataagggcggcgggttagaaggtcaatacagccagggtagtatcccaccgatgcctccaccgaagctggcgctccggtttccaaggctcctacctatcctgtacaagctgtaccaacattcaatatcaggctgcagtaaagctccacggggtctttccgtcctgtcgcgggtaacctgcatcttcacaggtactataatttcaccgagtctctcgttgagacagtgcccagatcgttgcgcctttcgtgcgggtcggaacttacccgacaaggaatttcgctaccttaggaccgttatagttacggccgccgtttactggggcttcaattcgcaccttcgcttacgctaagcgctcctcttaaccttccagcaccgggcaggcgtcagcccctatacttcgccttacggcttcgcagagacctgtgtttttgctaaacagtcgcctgggcctattcactgcggctctctcgggcttgcaccctaacagagcaccccttctcccgaagttacggggtcattttgccgagttccttaacgagagttctctcgatcaccttaggattctctcctcgcctacctgtgtcggtttgcggtacgggcacctctcacctcgctagaggcttttcttggcagtgtggaatcaggaacttcgctactataattcgctcgccatcacagctcagccttcacgggaaacggatttgcctatttcccagcctaactgcttggacgcggatatccaataccgcgcttaccctatcctcctgcgtccccccattgctcaaatggtgaggaggtggtacaggaatatcaacctgttatccatcgcctacgcctttcggcctcggcttaggtcccgactaaccctgagcggacgagccttcctcaggaaaccttaggcattcggtggaggggattctcacccctctttcgctactcataccggcattctcacttctaagcgctccacaagtccttccggtcttgcttcacagcccttagaacgctctcctaccactgttcgaagaacagtccgcagcttcggtgatacgtttagccccggtacattttcggcgcagagtcactcgaccagtgagctattacgcactctttaaatggtggctgcttctaagccaacatcctggttgtctaagcaactccacatccttttccacttaacgtatactttgggaccttagctggcggtctgggctgtttccctttcgactacggatcttatcactcgcagtctgactcccaaggataagtcatcggcattcggagtttgactgaattcggtaacccggtaggggcccctagtccaatcagtgctctacctccgagactcttaccttgaggctagccctaaagctatttcggagagaaccagctatctccaggttcgattggcatttcacccctacccacacctcatccccgcacttttcaacgtgcgtgggttcgggcctccattcagtgttacctgaacttcaccctggacatgggtagatcacctggtttcgggtctacgaccacgtactcaattcgccctattcagactcgctttcgctgcggctccgcatcttctgcttaaccttgcacgggatcgtaactcgccggttcattctacaaaaggcacgccatcacccgttaacgggctctgactacttgtaggcacacggtttcaggatctctttcactccccttccggggtgcttttcacctttccctcacggtactggttcactatcggtcactagggagtatttagccttgggagatggtcctcccggattccgacggaatttcacgtgttccgccgtactcaggatccactcaggagagaacgaagttttgactacagggctgttacctcctatggcgggcctttccagacctcttcatctacctcgttcctttgtaactccgtacagagtgtcctacaaccccaagaggcaagcctcttggtttgggctggtcccgtttcgctcgccgctactcagggaatcgcatttgctttctcttcctccgggtacttagatgtttcagttccccgggtctgccttctcatatcctatgtattcagatatggataccactccattacgagtggtgggtttccccattcggaaatctccggatcaaagcttgcttacagctccccgaagcatatcggtgttcgtcccgtccttcatcggctcctagtgccaaggcatccaccgtgcgccctttctaacttaaccgttaaaaagaatcactacgtgatatcttgcattactaattgaatgtgaattacttctgttatctagttttcaaagaacaacatctcgaagaatcgaatgatccttcaaaactaaacaagacagggaacgttctgtttataagacccgaggtcttatattccgttaaaatccttagaaaggaggtgatccagccgcaccttccgatacggctaccttgttacgacttcaccccaatcatctgtcccaccttcggcggctggctcctaaaaggttacctcaccgacttcgggtgttacaaactctcgtggtgtgacgggcggtgtgtacaaggcccgggaacgtattcaccgcggcatgctgatccgcgattactagcgattccagcttcacgcagtcgagttgcagactgcgatccgaactgagaacagatttgtgggattggcttaacctcgcggtttcgctgccctttgttctgtccattgtagcacgtgtgtagcccaggtcataaggggcatgatgatttgacgtcatccccaccttcctccggtttgtcaccggcagtcaccttagagtgcccaactgaatgctggcaactaagatcaagggttgcgctcgttgcgggacttaacccaacatctcacgacacgagctgacgacaaccatgcaccacctgtcactctgccccgaaggggacgtcctatctctaggattgtcagaggatgtcaagacctggtaaggttcttcgcgttgcttcgaattaaaccacatgctccaccgcttgtgcgggcccccgtcaattcctttgagtttcagtcttgcgaccgtactccccaggcggagtgcttaatgcgttagctgcagcactaaggggcggaaaccccctaacacttagcactcatcgtttacggcgtggactaccagggtatctaatcctgttcgctccccacgctttcgctcctcagcgtcagttacagaccagagagtcgccttcgccactggtgttcctccacatctctacgcatttcaccgctacacgtggaattccactctcctcttctgcactcaagttccccagtttccaatgaccctccccggttgagccgggggctttcacatcagacttaagaaaccgcctgcgagccctttacgcccaataattccggacaacgcttgccacctacgtattaccgcggctgctggcacgtagttagccgtggctttctggttaggtaccgtcaaggtgccgccctatttgaacggcacttgttcttccctaacaacagagctttacgatccgaaaaccttcatcactcacgcggcgttgctccgtcagactttcgtccattgcggaagattccctactgctgcctcccgtaggagtctgggccgtgtctcagtcccagtgtggccgatcaccctctcaggtcggctacgcatcgtcgccttggtgagccgttacctcaccaactagctaatgcgccgcgggtccatctgtaagtggtagccgaagccaccttttatgtctgaaccatgcggttcagacaaccatccggtattagccccggtttcccggagttatcccagtcttacaggcaggttacccacgtgttactcacccgtccgccgctaacatcagggagcaagctcccatctgtccgctcgacttgcatgtattaggcacgccgccagcgttcgtcctgagccaggatcaaactctccgataaagtagtttgactgactacgcacatcgctgtgcgatttatttaaaactttgaattaacaggtacgttttgtcttgtttagttttcaaagatcattaccgcttgttgaagcagctttattatcttaccactcagcttcttttatgtcaacaactttttttaagttgtttccgaagctttttgttgttgtctgctgtccatcagcgacgtttaataatataccacggtgcttctctataaatcaagcattttttttaaaaagagaaaaaaagaaaaccagtatattatctttaaagcttgagaatggtcgggaagacaggattcgaacctgcgaccccatggtcccaaaccatgtgctctaccaagctgagctacttcccgattttaaaaaatattatggcgcgcccgagaggagtcgaacccctaaccttttgatccgtagtcaaacgctctatccaattgagctacgggcgcaatcaatttcacaatatcccgttgggataaaatggagcggaagacgggattcgaacccgcgacccccaccttggcaaggtgatgttctaccactgaactacttccgcaagtaaaagtgtaatacatggccagaatacagcttcagatagcggtaaaccgtattgttatttatactgttcattatgacaaaagtaattatatcaaggttttgataaaagtcaatatcgtttaacaattaattatgttaatctcttttgcatccttgaagaaaggcttcatcaggagacgcgctaaatacctacaccttaactggtacaatcagcaacaggtttttactgaactaaacaaaaaataacagttccataacattcggaaactgcttcagatcaacgtattttagataagcttccaagcgggctcgaaccgctgacctcttccttaccatggaagtgctctacctgctgagctatggaagcaatggctccgcaggtaggactcgaacctacgaccgatcggttaacagccgatagctctaccactgagctactgcggaatattataagcttcataaacaaaaacatggtagataaaataaaaagcttggcggcgtcctactctcacagggggaaacccccgactaccatcggcgctgaagagcttaacttccgtgttcggcatgggaacgggtgtgacctcttcgctatcgccaccaaaccattgagagtgttctctcaaaactagataacagtaagcatacattcaaattggttaagtcctcgatcgattagtatctgtcagctccatgtgtcgccacacttccacctcagacctatcaacctgatcatctttcagggatcttacttccttgcggaatgggaaatctcatcttgagggggcttcatgcttagatgctttcagcacttatcccgtccgcacatagctacccagcgatgcccttggcagaacaactggtacaccagcggtgcgtccatcccggtcctctcgtactaaggacagctcctctcaaatttcctgcgcccgcgacggatagggaccgaactgtctcacgacgttctgaacccagctcgcgtaccgctttaatgggcgaacagcccaacccttgggaccgactacagccccaggatgcgatgagccgacatcgaggtgccaaacctccccgtcgatgtggactcttggggagataagcctgttatccccggggtagcttttatccgttgagcgatggcccttccatgcggaaccaccggatcactaagcccgactttcgtccctgctcgacttgtaggtctcgcagtcaagctcccttgtgcctttacactctgcgaatgatttccaaccattctgagggaacctttgggcgcctccgttaccttttaggaggcgaccgccccagtcaaactgcccacctgacactgtctccccgcccgataagggcggcgggttagaaggtcaatacagccagggtagtatcccaccgatgcctccaccgaagctggcgctccggtttccaaggctcctacctatcctgtacaagctgtaccaacattcaatatcaggctgcagtaaagctccacggggtctttccgtcctgtcgcgggtaacctgcatcttcacaggtactataatttcaccgagtctctcgttgagacagtgcccagatcgttgcgcctttcgtgcgggtcggaacttacccgacaaggaatttcgctaccttaggaccgttatagttacggccgccgtttactggggcttcaattcgcaccttcgcttacgctaagcgctcctcttaaccttccagcaccgggcaggcgtcagcccctatacttcgccttacggcttcgcagagacctgtgtttttgctaaacagtcgcctgggcctattcactgcggctctctcgggcttgcaccctaacagagcaccccttctcccgaagttacggggtcattttgccgagttccttaacgagagttctctcgatcaccttaggattctctcctcgcctacctgtgtcggtttgcggtacgggcacctctcacctcgctagaggcttttcttggcagtgtggaatcaggaacttcgctactataattcgctcgccatcacagctcagccttcacgggaaacggatttgcctatttcccagcctaactgcttggacgcggatatccaataccgcgcttaccctatcctcctgcgtccccccattgctcaaatggtgaggaggtggtacaggaatatcaacctgttatccatcgcctacgcctttcggcctcggcttaggtcccgactaaccctgagcggacgagccttcctcaggaaaccttaggcattcggtggaggggattctcacccctctttcgctactcataccggcattctcacttctaagcgctccacaagtccttccggtcttgcttcacagcccttagaacgctctcctaccactgttcgaagaacagtccgcagcttcggtgatacgtttagccccggtacattttcggcgcagagtcactcgaccagtgagctattacgcactctttaaatggtggctgcttctaagccaacatcctggttgtctaagcaactccacatccttttccacttaacgtatactttgggaccttagctggcggtctgggctgtttccctttcgactacggatcttatcactcgcagtctgactcccaaggataagtcatcggcattcggagtttgactgaattcggtaacccggtaggggcccctagtccaatcagtgctctacctccgagactcttaccttgaggctagccctaaagctatttcggagagaaccagctatctccaggttcgattggcatttcacccctacccacacctcatccccgcacttttcaacgtgcgtgggttcgggcctccattcagtgttacctgaacttcaccctggacatgggtagatcacctggtttcgggtctacgaccacgtactcaattcgccctattcagactcgctttcgctgcggctccgcatcttctgcttaaccttgcacgggatcgtaactcgccggttcattctacaaaaggcacgccatcacccgttaacgggctctgactacttgtaggcacacggtttcaggatctctttcactccccttccggggtgcttttcacctttccctcacggtactggttcactatcggtcactagggagtatttagccttgggagatggtcctcccggattccgacggaatttcacgtgttccgccgtactcaggatccactcaggagagaacgaagttttgactacagggctgttacctcctatggcgggcctttccagacctcttcatctacctcgttcctttgtaactccgtacagagtgtcctacaaccccaagaggcaagcctcttggtttgggctggtcccgtttcgctcgccgctactcagggaatcgcatttgctttctcttcctccgggtacttagatgtttcagttccccgggtctgccttctcatatcctatgtattcagatatggataccactccattacgagtggtgggtttccccattcggaaatctccggatcaaagcttgcttacagctccccgaagcatatcggtgttcgtcccgtccttcatcggctcctagtgccaaggcatccaccgtgcgccctttctaacttaaccgttaaaaagaatcactacgtgatatcttgcattactaattgaatgtgaattacttctgttatctagttttcaaagaacaacatctcgaagaatcgaatgatccttcaaaactaaacaagacagggaacgttctgtttataagacccgaggtcttatattccgttaaaatccttagaaaggaggtgatccagccgcaccttccgatacggctaccttgttacgacttcaccccaatcatctgtcccaccttcggcggctggctcctaaaaggttacctcaccgacttcgggtgttacaaactctcgtggtgtgacgggcggtgtgtacaaggcccgggaacgtattcaccgcggcatgctgatccgcgattactagcgattccagcttcacgcagtcgagttgcagactgcgatccgaactgagaacagatttgtgggattggcttaacctcgcggtttcgctgccctttgttctgtccattgtagcacgtgtgtagcccaggtcataaggggcatgatgatttgacgtcatccccaccttcctccggtttgtcaccggcagtcaccttagagtgcccaactgaatgctggcaactaagatcaagggttgcgctcgttgcgggacttaacccaacatctcacgacacgagctgacgacaaccatgcaccacctgtcactctgcccccgaaggggacgtcctatctctaggattgtcagaggatgtcaagacctggtaaggttcttcgcgttgcttcgaattaaaccacatgctccaccgcttgtgcgggcccccgtcaattcctttgagtttcagtcttgcgaccgtactccccaggcggagtgcttaatgcgttagctgcagcactaaggggcggaaaccccctaacacttagcactcatcgtttacggcgtggactaccagggtatctaatcctgttcgctccccacgctttcgctcctcagcgtcagttacagaccagagagtcgccttcgccactggtgttcctccacatctctacgcatttcaccgctacacgtggaattccactctcctcttctgcactcaagttccccagtttccaatgaccctccccggttgagccgggggctttcacatcagacttaagaaaccgcctgcgagccctttacgcccaataattccggacaacgcttgccacctacgtattaccgcggctgctggcacgtagttagccgtggctttctggttaggtaccgtcaaggtgccgccctatttgaacggcacttgttcttccctaacaacagagctttacgatccgaaaaccttcatcactcacgcggcgttgctccgtcagactttcgtccattgcggaagattccctactgctgcctcccgtaggagtctgggccgtgtctcagtcccagtgtggccgatcaccctctcaggtcggctacgcatcgtcgccttggtgagccgttacctcaccaactagctaatgcgccgcgggtccatctgtaagtggtagccgaagccaccttttatgtctgaaccatgcggttcagacaaccatccggtattagccccggtttcccggagttatcccagtcttacaggcaggttacccacgtgttactcacccgtccgccgctaacatcagggagcaagctcccatctgtccgctcgacttgcatgtattaggcacgccgccagcgttcgtcctgagccaggatcaaactctccgataaagtagtttgactgactacgcacatcgctgtgcgatttatttaaaactttgaattaacaggtacgttttgtcttgtttagttttcaaagatcattaccgcttgttgaagcagctttattatcttaccactcagcttcttttatgtcaacaactttttttaagttgtttccgaagctttttgttgttgtctgctgtccatcagcgacgtttaataatataccatgcatcggctgaatttagcaagtatttttttcgtttttttttgaaacgtatttcgttatattcatctccgccgcggcatacgatgtaatcaagcatggacaagataaggaggcgtcaccagtgaaccacttctacgtgtggcacatcagaaggataaaacagctgcttattattatcattgccgcatttgcagcagccagctttttttatatacagagagccgtcccccttcctgtatttttaactgatagcggcccgaaggctatttcaaaaggggagacgaaagcgggcgaagtcgcattaacattcgatatcagctggggcgatgaaaaagcggttccgattctgaacgcgctaaaagcaaacggtattaaaaacgccactttttttctgtcagcttcttgggcggaacggcacccggacacagttgaacgtatggtaaaagacggacatcaaatcggcagcatgggatatgcgtataagaattataccaacctagaggacaacgaaataaaaaaagatatccttcgggcccagaccgcatttaaaaagctgggtgtgaagaatgttcatttactccgcccgccgaccggacaatttaataaaaaggttcttgccattgcacagcagtaccgctattcagtggttcattacagcgttaactcgcaggattggacaaatcccggtcctgataaaatcattgaaaatgtaaacagtcatataaaaggcggcgacattgtcctgctgcacgcctctgattcagcaacacagaccgaagaagcgctccccgccatcattcacaatttaaagcaaaaaggactgaaaaacgtgacagtcggcgacctgatcgcaaatactgacgtcaagtcatcagaagtgaaataactacctctgggcaaacttcggcagcattaacagctgaaacgcattgcagcccatcagcggaatcagcatcaaataaagccagtcctcattattcactcttagcgcaggaacccattcaagcgctgtaataacgaccattaaaaataatgatgaaacgaacgtattttttgaggactgcttttgttttatatacgccgtcagcaagccgacggcaagcagagccagcggcagccagacaaaccccgcaatcgagtcatcccgctcaccgaaaaacaaaaatctgacgtacattaaatcaaaagcgacaaacagaatgataaacagctgaagcagattccaaagcgagtttgatctgaggatttcaagggcaaaccggtgcaccgtcagaaagacgaagaatcccatctggctgatcacactgaaaatcatgcctaccccgataaaccagatcagaacggagaaaatttgaccggcctcaaaattcagaaagaacccttgtactccccccacttcagtgcaaatcccacgacgcttgtaataagagcgcccacagctaaaatcgaaaagaaaaatcgaacaagcccgcggcttttcatctcttattcatccccctgacaatcgcgttcagcgatattttgttatgtataaatccattccgatgaatcatattaaaaataagtacaagtaaggaaggagcttatgcatgtcaaaagccaaaacgctattgataagctgttttgttgtattatctgtaacagcttgtgctccaaaagaccaagcagcggatatggattatgaccagactaaaaaaatggttgttgatatattaaagacagatgatggaaaaaaagcaattaaggaaatattaaatgatgatgcgatgaatgaggcattggtgattgatcaaaatgccattaaaggcacaatagagaaaaccctcacctctaaaaaaggggcggagttctggaaaaccatctttgaagactcaaagttcgccgagagctttgcaaaaacgcttcagcccgagcacgaaaaaatcataaaaaaattgatgaaagaccctgattatcagaaaagttttatgcagatcatgcaggaccccggcatggataaaaaatactatgagctggtgaaaagccaaaagttccgcagttacttagaagatgtaattacagagacactttccagcccgcttttcaaaaagcaattcgaggatgaattgaaaaaagcggcttcaagttctgaaaaagaaagccaataaaaggccgggccgtgttgatcccggccccttttttattcagctgttttttcaatgactttttgggcgatacccatataaatttccccgatcggatgacttctgtcatagacagaaggcgcaaactggtccttgtcccaatcaggctgttttaaaggaattctgccaagcagcggcacctgcaattcctctgcaagcttatctcccccgccttgaccgaacacatattctctctcgccggtttttgcactttcataataagccatattttcaatgacccctacaacttcatgatcggtcttaatcgccatagatcccgctctcgccgctacaaatgcggctgtagggtgcggcgttgatacgataatctctttgcagctcggaagcatcgtgtgtacatcgagcgccacatcacccgtgccgggcggcaggtcgagaacgatatagtcaacctctccccagtcaacctcatggaagaagttattcagcatcttgcccagcatcggccctctccacacaaccggagcgttttcttcgacgaaaaagcccatcgacataacctttactccaaatctttcgacaggaagcagtttttctccttcaactgtcgggcgaactgtaatacccatcatgtccggcacgctgaatccgtatatatccgcgtcgatcaagccgactttttttccgagccgcgcaagagaaatggccaggttgacggaaaccgttgatttgccgacaccgccttttccgcttgccaccgcaagaaagaccggcggatgtttcctattcagcagggtttcgctttcagcagcaggccggctgaatttcgccaatgtttcttccggcagctcttcaaaccgaagtcccacagtttccgcacccgcttctttcagaacggatacgatttcctgctgaatgcccatctgttcagccgtccccgtttttgccaatgcaatttttacactgacatgccgtttttccggcttgacctttacttctttaatggcatccaattctcccagcggtctatgaagaaaaggttcgcgcatgtttccgactatatttcttacttcatcttctcttatcatcgaaccctcaccctttgtgtattcgtttacaaatggtattataccatatattaaacgtagaatcggcgaaaaaccctccttactcgggagggtctcctttttctgtaaaatatctcaacacgcccttatacacggaagaagcgattttgtcctgatatttaggctggccaagccttttcgcttccgcgggattggacagaaatccgatttccaccagggcgcccggtttggttacattctgcattaagtaaatgccgtgtatccgtttcgcctttctcgttgtattctccaaattgattctcaattcgtcctgtatatattttgccactttttcattctcttcgtattttccatagtagaagctttgggcgccgctccatctcggtgacggtatggcgttcagatgaatgctgatataaagctccgcctctgaacggttgatgatctccacgcgctttctcagatcttccgctttgcgtctgctgtagcctttcgtcccttcaggagctaaatcagtatccgtctcccgcgtcataatgaccaaagctccctgctcctgcaaatagtctctgaccctggaggccacttcgagagtaatgtccttttcaaggtgactgcctcccgtggcgcctccgtccggcccgccgtgtcccggatcgagatagatgattttcccgctcagcggcaggctccacggccgccatgaatcatcattatggaattgaaaccggaataaacacaataatatgataaagccaagtaaaaaaccgagccatttcagcttttttgtcatagctttccctcccgcttgtccccgttattaataagtatgggacaagggaagaaattatgattacctcatgcggagcttacattgtttttctctttgcagaaatccttccgtccaccagctgttgataaaccggcaggacgcttcatagatttctttttgttcaacggaagaatattgctcatgcgtccaattgcaaagatattcaaaaaaatcggccgtcagttcttcctcttcttcagccgaacgggcgttcgccctctgcaaagactcaccataaaatccaaagacgccgaaccggccgcctaataaatacgcttcaattgcaaaatctatgcatccttcactcagaatgccgttttcgtcttgaagaaagggaaacaaaggggtgagacatgcttttacggactgaatgatctgcgtcagtgacagctcctttagtaaactcttctcaagctcataatccttctgccgtttcacgtctgaaaaagataatacttctgccattgccagccacgctcctttttactgttattttgaaaggaaaagggaaaaagcatgctttgttgatagtggaaatcctcccaaatgaaggagtttcatgttaactggaagaataaagagctgaggtgacgtgatgaaaaagctgtttcaatacaattggacggtgcgtgacgagtggtttatgatatgtgaaaagctgagccgggaggaactgacgaaaacccggacgggcggaatggagagcatcttgcggactttatttcatatcattgatgtcgagatcagctgggctcgtgccattttaggtaaagatgatgttttacccgctgagtctgactatacgagcattcaggatctcagaaagctgtctgaacagtatcgggaggatgtcattcatgcggtctcccgcaaaggggcggatcttgttaagccggactggatggaccaaacctttcctaaagaagatattctccgccacatccttgcgcatgagattcaccacatgggacaactgtcggtttgggccagagagattggaatagaaccggtttcggctaatgtgatcagccgtccgcaggaaaaagccgcaaaaaaacagcacctctgacgggatgccgtttttatattttaatgcttcttgttacggagtatgtattaatgtattcatccagcacgaggccgcctttgtcctcgtaaaaaccggcaaccataaagcctgcgtcaatctgacctttaatttgatcctccagcgtatggccgaattcaagcgcttcatgattatcaataagttcctttacctttttcttactcagatctttttcatccgaaaacggaatggaatactttacttttagtacgccttcctgctctaaatccatatcaaataagaacacgacgggatttacaaaaccggagactaaagacccgccttttttcaatacgcgataagcttctttccataccggaagaaccgtatcaacaaagcaattcgataccgggtgcacgataaaatcaaatgtctcatcatcaaaacagctcagatcattcatgctgcctttgacagtccgaagcgtaagaccgtcccgctgggcaaccattctgtcttgcgcaagctgtttttccgaattgtcaaagatggtgacgtccgctcctgcagcagcaaggaccggcccttgctgtcctcctcctgaagcgagacaaagaacctccagaccgtctatgggcggaaaccaatccgccggcacatcttttccgggggtcattctgatgctccaattgccttttttcgcttcaccaattgtatgagaatcaaccgcaaccgtccattcattgcctgtttcgacttttttatcccatgccttgctgttatgtatgactaacttattcattataactgcgctccttattggtaatgaatagagtataacaaacaattctagaaaaacatcggataacctcttcgatatgagaaaaaaatacaaaaaaaccacaaccaagaagttgtggtttttgccatccaaaacgattaacgttttgagaactgaggtgcacgacgagcgcctttaagaccgtattttttacgttctttcatacgggcgtcacgagtcagaagaccagcacgtttaagtgttgcgcggtattctggatctgcttcaagcaaagcacgagcgataccgtgacggattgctccagcttgaccagataagccgcctccatgtacgtttactaaaacatcataagtaccagctgtttcagttaaagttaatggttgtttgatatcttcgattagagccggagatggaatgtgctcgctgatttcacgattattaacgacgatacgaccttctcctggaactaagcgcacacgcgctacagaacttttacgacggccagtaccgtaatattgaacctgtgccaaattggtaacctcctttttaattaaccgcgaagttcgtaaacttcaggtttttgtgcttcatgtggatgctcagaaccacggtatacgttcaatttcttgaacatttgacgacctagagaaccttttggaagcatgcctttgatagcaagctcaagcattttctcagggtagtttgtacgcatttcaagagctgttcttgatttcagaccgcctgggtgcattgtgtgacggtagtagattttatcagttaactttttaccagttaactcgattttttcagcgttgatgatgatcacatgatctccagtatcaacgtgcggtgtgtaagtcggtttgtgtttcccgcgaaggatagatgcaacttctgtagaaagacgtcctaaagtcttgcctgctgcatcaacaactaaccacttgcgttcaatagtacttgcgttagccataggtgttgtacgcatttaattccctcctaaatgatctgtcattttttcataaacttctgttacgttctatttcacaacacaataagttccggggcttatcgtggggttgaaatacataccatatgatatcttataactttatgcagactctgtcaagaaaatgttacacctggtttagttgtcatagcaaacgctccataaatacagcccgtgccccggtgcggtgcgccccgcggcttcgcgatccttcgcttcgagcattgcttttacatcatcgggagaaaattttccagctcctgtatccaataacgttccggcaatgattctgaccatattatagagaaaaccgtttccggtgatccgcatctgcaggccgtctccggtctcagtccaatccagctcgtaaatcgttctgaccttatcctgaaccgcggtatcagccgcgcaaaagcttgtgaaatcatgtgtcccgatgaggtgccttgaagcttccctcattttctgcacattaagctgatatgcaaaatggtaagcgtaatgtcgtttaaatacgtccgggtgtttctccgtatatacaaagtagcgatattccttttggactgcgctaaatcgtgcatggaacccatcatccgcaatctctgctgttttgacggcaatatcatcaggcagcagggcattgagcgcaaacggccatttctcagccgggatggacagcggcgtatcaaaatgaataacctgcccggcagcatgaacatcgctgtccgtgcggcccgatgagatgacaggcaccctgccgtccgttttatggatgacggccagcgctttttccaattcactttgaacggtccgctttccaggctgaacctgatatccgttaaataaatgcccgtcataagcaatggtacatttcactctcattcagcagcacctctaacttcttaagaaaaacaataacacggctaatacgatgatgagcagaatggctccggtatcctttccggtccagacgagctttctgtatttcgttctcccctcaccgccctggtagcctctcgcctccatggcgaccgcaagctcttccgcgcgtttaaaggcgctgacaaacagcgggacaagcagcggaacaaccgctttgattctgtctttcaccgggccgcttgtaaagtccgcacccctcgccatttgcgccttcatgattttatctgtctcttccatcaatgtcgggataaatcgcaatgatatcgacatcatcaatgcgagttcgtgtacgggcagcttcacctttttaaaaggattcaagagctgctccattccatccgtgatttcaatcggcgttgttgtcagcgtcagcagcgttgtcataaagataaggtaaacgaaacggagggagataaaaatcccctgtataagtccgccctcatacactttaaaccagccaagctgaaaaatgacagatccttcatgcgtcatgaaaatgtgtaataaaaaggtaaacgccacaatccagataatcggcttaagccctttcagcaaaaagctgaacggcactcgtgttaaggcgatcaccccgaatgtaaacaaaccgagcaaagcatacgtttgtacgttgtttgccaaaaaaacgatacatacaaaaagaaagatgctgacaagttttgttcgcgggtccaatcggtgaataagcgatgatccgggaacatactttccgataatcatgctgtccatcattggtccttttcctcctgaaagaaagccttaatttcgctcgcggcatcctgcagggtcagcatgggtttttcatacttaactccgagagcctcctcaagccgtctctgaaacttcaccgactcaggaagatccagtcccatttcggccatctcttcaccttttacaaacaagtcacgcggactccccgtcgctttaatggtgcctttgtgcatgacgatcatttcgtcagcatagcgggcggcgtcctccatgctgtgggtgacgagaacggtagtcaggtttccccgctgatgaagcgcatagaacatgtccataatgtcctggcgccctctcggatcaagaccggctgtcggttcatccaaaaccagcacttccggctccatcgcgagaacgccggcaatcgccactctgcgcatctggccgccgctgagctcaaacggtgaacgatccaaaatgtcttccggaaggcccacaagccccagcatttcttttgctttccgttcagcgtcttctttttttacaccgaaattcatcggtccgaatgcgatgtccttcagcacagtctcttcaaacagctgatgttcgggaaattggaaaacgattccgactttttttcgcagagtcttaaggtctttattctttttaccggctgccagaatcgtgctcccgagctcaagctgtcctttagtcggtttcagcaaaccgtttaaatgctgcaggagcgtcgatttgcccgaccctgtatgtccgatgacggcaacgtagctgccctcttttatcacggcattgatatcatacagagcaagccgttcaaacggtgtcttcatttgatagcggtgttctacatctttgattttaatgtccacagctcattcaccagcccttcctgagtcagatggtttttcgttaacgccagtccgctttctttcaaaagcaggctgagctggaatgagaaaggcaaatcaagaccgatgcgaaccaagtcttcatttaatttaaaaatctcttcaggcgtgccctctgcatatttcctgccgccgttcatcacaatgatcctatccgcccttgcggcttcttccaggtcatgtgttatcgaaatgacggtggccatgccctgatcttttaagcgtctgacagtatcaaggacttcttctctcccaatcgggtcaagcatggatgtcgcttcatccaaaatcataatatcaggacgcgcggcaataattcccgcgatcgccactctttgtttttgacctccggagagatggtgcggctcttgatcaagaaaatcctgcatattgacttgtgtgacagcccaatctactctctcaatcatttcttcgcgcggaacaccattgttttctaaaccaaaagccacatcatcgcgaacagtcgttccgacaaattggttatcgggattctgaaagaccatccctattttttttcgcacatcccacacggtatcctcagtcagcttgatgccgccgacttcaatttctccggcctcaggcaaaatcagcccgttcagcgctctggccaaagtcgacttccctgaaccgttgtgacctacgatagcaagccattctccttcatatacctccagactcacaccgtccagcgccggtcttactgcatctttgcggtagcggaatagaatgtcttttacggatataagctgtttttgatccacgggcgcctgacctcctctcagctatagctctgcttttctgtctcatgataaaaagttctgatatctaaaaaaagggcatagatccagttagaaactgtcccgcccttctttagatacacaaaaatatgtgattaaaccaattcgatgattgccattggtgcaccgtcaccacggcgaggaccaagcttcataatacgtgtgtatccgccttggcgctcctcgtaacgagttgcaatgtcagagaataatttttgaagtgcatcttggttattttcttcattagcaacctcgttgcgaatgtatgcagcagcttgacgacgagcatgcaagtcaccgcgcttaccaagagtgatcatcttttcaacaacagagcgaagttctttcgcacgtgtttcagttgtttcaattctttcgttgatgatcaaatctgttgtaagatcacgaagcatagctttacgctgtgaactcgtacgtcctagttttctgtatgacatgtgatgtcccctcctttaatggaatgctgtttctaattaaaaaacacacgaaaatcctagttcacatggaaactagatcaatcgtctttgcgaaggccgagtccaagttcttcaagtttcgctttcacttcttcaagtgatttgcgtcccaggttgcgaactttcatcatatcttcttccgtcttgttcgcaagttcttgaaccgtgttaatgcccgcacgcttcaagcagttgtaagaacggacagaaagatcaagttcctcaatcgtcatttcaagaactttttctttttgatcctcttctttttcaaccatgatttcagcatgctgagcttcgtcagttaaaccgacgaatatattaaggtgttcagttaaaatctttgaaccgagagcaattgcttccttcggtccagtgcttccgtcagtccaaacatcaagtgtaagtttgtcatagtttgcaacctggcctacacgagtgttttctacctgataagataaacgagaaactggcgtaaagattgaatcgatcggaatcacgccgattggctgatcgtctcttttgttcgaatcagcaggtgtatacccacgtcctctttgtgcagtaaggcgaactcggaaactcgcattctcaccaagagtcgcgatatgaagatccggattaaggatttcaacatcgctgtcgtgtgtaatatcagctgctgtgacagttccttcgccctgtacatcaatttcaagcgtcttctcttcatcagagtagattttcaatgcaagctttttaatgtgcaagattatcgttgtaacatcttccacaacgccttcgattgtcgagaattcgtgcagtacaccatctatctggatcgatgttacagcggcaccagggagtgaggataagaggatacgacgtaaggagttacccagagttgtaccatatccacgctcaagcggctctacgacaaacttaccaaatttggcatcgtcgctgatttcaaccgtttcgatttttggtttttcaatctcgatcattacttaaaaccctccttcaaaacgtcgaaacctcgaatagaatcatatgagattccatccgaaattccccattgtttagtcccgtatgtgctcaggcaacgagtcggtgcattcgtttcataaataactgtatcataacccattattgacagggacacaaaatctatacaaacaaattacacgcggcgacgttttggtggacggcatccattatgaggaacaggagttacgtctctgatagctgtaacttcaagtccggcagcttgtaaagcacggattgcagcttcacggccagaacctggtcctttaacagttacttcaagagttttaagtccgtgttcgattgaacctttagcagctgtttcagcagccatttgcgcagcaaaaggagtcgatttacgagaacctctgaatcctagagctccggcacttgaccaagaaatagcattaccatgagtatcagtgatcgtaacgatcgtgttgttgaaagttgaacgaatatgagcgattcctgactcaatattctttttcacgcgacgtttacgcgtgttttgtttacgagcagcagccattgtttaggtacctcccttacttattttttcttgttagctacagtacgacgcggacctttacgagtacgcgcattgtttttagagttttgtccgcgaacaggcaaacctctgcgatggcggattccgcggtagcttccgatttcgatcagacgcttgatgttaagagaaacttcacggcgaaggtcaccttctactttcagtttgtcaataacatcacggattttaccaagttcttcttcagtaagatcacgcacacgagtatcttcagaaacaccagcctctttcaagacttgctgagccgttgtgcggccaattccgaagacatatgttaaagaaataacaacacgtttgtcacgtgggatatctacaccagcaatacgagccattctctgggcacctccttattaattatccttgtttttgtttatgctttggattttcacagatcaccattacttttccttttctgcgaataactttacatttctcgcagattggtttaactgatggtctcactttcatgtgtttccaacctccttcagtttccggagtgctttatttgtaacggtacgtaatcctgccacgagttaagtcatatggagataattctaccgtaactttgtctccaggtaaaatgcgaatgaagtgcatgcggattttaccagatacgtgagccaaaaccgtatggccattttcgagttcaactttgaacatcgcgtttggcagtgtttcgacaatcgtaccttccacttcaattacatcgtctttcgccattcaagtgttctcccttcttcaaatcagtaacttgctctctgacaaatttcaaaagagaaaatctcagttatccgtttgtcacacgccctgtttcgtttatactgttctgaacttccggagatacgcaatcataaagggtgaatgattgatattctttttctaaggagaatgaaatgtacgcttttctccgtctgctttagtacacgatgatgaatcttccttccgatgacagcagctagccggtttttcttccgaccaattgtaaacctacaatctgcccaggtgcggaatgaaaaacatgtgtcatggaattcatttcatcatctagacttttgtcagtatatcaaaacccgtttccgtaatcgcaatcgtatgttcaaaatgagcacactttttcccatctaccgttacaaccgtccagttatcagccaatgttttcacataccggctgccagcgttaaccatcggttctatagcgagaaccataccaggcttcagcctaggtcctttgtttggcggaccgtaatgaggaatttgcggatcctcatgcaagtcttgaccaacaccatgtccgacatactccctaacaactgaaaactgctcattttcgacatacgtttgtattgcgtgggaaatattcgacaaacgttcacctggttttgcttccttcaagcctttatataaagactcctctgtcacttccagcagtcgtttatcatcatcactgatgtttcctaccggatatgtccaagcagagtcaccatgataaccatttaatttagcaccgatatcaatgctgataatgtcaccgtcacgcaaaacccttttaccgggaattccgtgaacgagttcttcattaactgatacacagatgctcccgcgaaacccattataccccttaaaagatgggattgcaccctgcttctcaataaaacgttcggcaatttgatccaattcttttgtcgagattcctggtttaatgtgctttttcatctcttcatgagtcaaagccacgattcgccctgcttcccgcatgatgctaagctcacgaggggtcttacagataatcatttgctcaatcctccaagaagctctttcacatctttgtacacgtcgttaatgtcctgctggccattgacgttgacaagataccctttctcagaataaaaatcgagtaaaggctgagtctgcttcatgttgacctcaagccgttttgagacggtttcctcattatcatctgcccgttgataaaggtctcctccgtctttatcacaaacacccggcgttttcggcggattgaaaaccaaatgataggttgtgccgcaaacactgcaaattctgcgtccagtcaaacgttccattaaagagtctttgtctactttaatgttaatgacataatcaatcggcttgccgtattcctcaagaatgttttcaagagcttcagcctgagcgactgttcgcggaaatccgtccagaagaaaacctctttcacaatcatctttgccgagtctttctttgacaatgccgattgtgacttcgtccggtacgagctcgcctttatcaatataagactttgcttcgagtccgagtggtgtttcttctttcatagcagcacggaacatatctcccgttgagatatgaggtatcccataatcctcaacaattcgttctccctgtgtgcctttaccggctccaggaagtcccattaagactaagttcattcggatttcccccgtcctctcttatttagaggaatggttaaaaccagtcctctaatttttcataaatcctcggtaattacgtttcactaactggctctccagctgcttcattgtctccaaggctaccccgacgacaattaacaatgatgttccgccaatctgtgcactttgaggcaatccagcgaattgaatgaaaaagataggaagaatggaaatcacggctaagaatatagaacccacaaacgtaagtcgatacaaaatgctcgtaattctatcttgagtcattttccctggacgaacccccgggatatagccaccctgtttttttaggttatcagccatttgttcagggtttacctgcacaaaagcatagaagtacgtaaaggcgataattaatgcgacataaaccgtcatgcccaccggatgtgtattgtcaaagttggcttgaatccactttgtcacatcgttttctccgaaaaatgacgcgatagtacgcggcgtaataaggaacgcaaccgcaaagattaccggaataacccctgccggattcactttaagcggaaggtgagttgactggcctccgccaacaggtgaacgaccttgcccttttgcatattgaatcgcgattttgcgtacagcctgctgaatgaaaataacaccaacaataacggctaaaatcgcaatcaccagtaaagcgattttcacaatatgaataaacagctgatcgctgctgccgacaaattgagtctcataaatctgcccaacagttttcggaatactagccacaatccccgcgaagatgatgatcgaaattccgttacctactccattggaagtaatttgttctcccagccacattaaaaaagcagttcctccagtgagtactaaagcaataatcagatatgtcgatatgccggatttttcaatcagcataccgtttgccaggttgttaaacccgtaagacatacctaatgcctggataaaaccaagcacaatcgtaaaatatctcgtgaactgagctaatttacggcggccgacttcaccttgcttagaccactcggtaaacttcggcacaacatccatctgaagcagctgaatgatgatcgaagcagtgatgtaaggcgtaattcccatcgcaaaaatggagaactgataaagcgcaccgccgccaaatgtgttaaggagatcaaaaacccccatcgaactttgtgtctgcaacgcctgagcatttacatatggcacagggataaacgcacctatgcgaaagacgataagcatgagtaatgtaaaaatgattttattccgaatatcactcacacgcataaagttggagattgtcttaaacaagttagatcacctcagctgtaccgccagcagcttcaacagcttctttcgcagaagcagagaatttattggcttttacagttaattttttctctaatttaccgttgccaagaatctttactcctgcattaagtttgctaataacaccagtctcaagaagaagttcaggagtgacttccgttccttccgcaaaaccgttcaatttgtctacgttcacaatagcgtattccttacggttgatgtttgtaaaaccgcgcttaggaagacgttggaataaaggcatttgtccccctcgaatccagggcgtacaccgccgccagaacgagcgttttgacctttgtgacctttaccagctgttttaccgttaccagaaccaataccacgacctacgcgattgcgtactttacgtgaaccttctgaaggctttaattcatgaagtttcattaggacacctccttagcctataatttatttttattgttctttaacagaaactagatgagatactttattaatcataccgcggatcgcagcgttatcttcatgaacgacagtttggtttgttttctttaaaccaagtgttcttacagtaacgcgctgatcttccgggcgaccgattacactgcgtttgagggtaatttctaatttagccattaatgttccctccttatcctaacagttcttctacagattttccacgaagcttcgcaacctcttcggcacgtttaagctcacttaaaccttgaagtgttgcacggatcatgttgatcggtgtgttagaacctaaagacttagaaaggatatcagcaacgccagcaagctcaagtaccgcacgtacagggcctccagcgataactccagtaccttcagaagcaggtttcaacaagatattgcctgcaccgaaacgtccgatgatttcgtgtggaatcgtagttccaaccattggtacttcaatcaaattctttttcgcatcttcaacagctttgcggattgcttcaggtacttcttgtgctttaccagtaccgaaacctacgtgaccgtttttgtcaccgacaacgactagagctgcgaaacggaaacgacgaccacctttaacaactttcgctacgcggttaaccgtaactaagcgttcttctaactctaatttgcttgggtcaatacgacgcataatcatgtgtccctcctttttttattaaaatttcagtccggcttcacgagctgcatcggccagagcttttacacgtccatggtataagtatccgccgcggtcaaatactacgtcagaaacacctttctcagaagcgcgtttcgcaacgagttcaccgactttagcagcagcagcgctgtcaccagtgctttccacgttcaaatctttatcaagagtagaggcactagcaagtgtaacgccatttacatcatcgatgatttgagcataaatgtgtttgtttgaacggaacacattcagacgaggtctttcagctgtgcctgaaagtttagcacgaacacgggcatgtcttttttgacgagcagcatttttgctagttttcgtaatcatccttaggtcactcctttcttcactttaagcggtcttacttagcagatttaccttctttacggcgaacaacttcaccttcgtagcggattcctttacctttgtaaggctctggagaacgtacagcgcggatgttagcagcgatagctcctacacgctctttgtctgtaccttttacaactactttagtttgagaaggaacttcgatttcgatgccctcttcaggaacgatctcaacagggtgagagtatccaacgtttaaaacaagtttgtttccggatttagccgcacgataaccgacaccgactaattccaaacctctttcaaatcctttagatacgccttcaaccatgtttccaagcagactgcgagtcgtaccatgcagcgcacggtgctctttgtgatcagaaggacgagtaactgtaagcacgttgtcctcaattttgatttccatatcaggatggaaagtacgagttaattctccttttggtccttttacagctacagtgttgccttcgttcagcgttactgtaactccagaagggatctcaagcagttttttacctacacgagacatactaaaacacctccattcttgttaaacttcttaccaaacgtatgctagaacttctccaccagcttgttttgcacgggcttctttgtccgttaaaacaccttgtgatgtagaaataatcgcgattccaagaccgttaagtacgcgaggtacttcatttgatttagcgtatacacgcaaacctggtttgctgattcttttaagaccagtgataacgcgctcgttgttttgtccgtatttcaagaaaacgcggatgataccttgtttgctgtcttctacgaactcaacgtcacgaatgaaaccttcacgctttaaaatgtcagcaatttctcttttcaatttagaagcaggaatttcaagcttctcatgacgtaccatgtttgcattgcgaatacgagtcagcatatctgcaattggatctgtcataaccattatataattacctccttcccattcttggggattaccagctggcttttttcacgccaggaatttgtcctttatatgcaagctcacggaaacaaatacggcaaagtttaaatttacgaatgactgagtgcggacgtccgcagcgttcacagcgagtgtactcttgcactttaaactttggtgtacgttgttgtttcgcaatcattgactttttagccacgatttcgcctccctttcattgattatttctggaacggcatacctacttgagttaatagctcacgagcctcttcgtcagagttagcagtcgttacgataacgatgtccattccgcgaacctttgttactttatcgtagtcaatttcagggaagattaactgttctttgataccaagagtgtagtttccgcgaccgtcgaaagatttcttagaaatcccgcggaagtcacgtacacgcggtaaagatacagaaataagtttatcaaggaaatcatacatgcgctctccgcgaagagttactttcgcaccgataggcattccctcacgaagacggaatccagcaattgatttcttcgcacgagtaacgacaggtttttgacctgcgataaacgttaattcttcaacagcactgtcgattgcttttgcgttttgaacagcatcaccgacacccatgttgattacgattttttcgatttttggcacctgcataacagagtcgtagttgaacttcgtcattaaagcaggtgaaatttctttattgtacttttctttaaggcggttcatgagatagacctcccttcctttaaatactatttatctaagacttgcccagatttttttgcaacacgaacttttttgccatcttccactttgtatcctacgcgagtcacttcaccagttttaggatcgagcggcataacgtttgatacatgaattggcgcctcttgattagaaataccgccttgagggtttgcttgagttggtttagagtgcttcttcaccatgtttacgccctcaactagaacgcggtcctttttagggaaagcagcaaggatcgtaccttgtttgcctttatctttaccagagataaccattactttatcgccttttttcacatgcatcctgatcgcacctccttgagtaaggcatttatttcattagataacttctggagccagagaaacaattttcatgaagttgttttcacgtaattcacgggcaaccggtccgaagatacgagttccacgcgggctcttgtcgtcacggatgataacacatgcattctcatcgaagctgatgtatgatccgtcagatctgcgtgctccgctttttgtgcgaacgataacagctcttacgacttcaccttttttgacaacgcctcctggtgttgcttgtttaaccgtgcaaacaattacatcaccaatgttagccgttttacgtccagaaccgccaagaactttaatagtaagtacctcacgcgcaccggagttgtcagcaacttttaaacgagtctcttgttgaatcattatttgttacctcccttcggaaaaagaattccgaactttattagataataacagcttcttcgacaacttctactagacgaaaacgcttagttgcagataatggacgagtttccatgatctttacgatgtctccgattttagcttggttattttcatcatgtgctttgaatttctttgagtattttacgcgtttaccgtaaataggatcctttttgtatgtttcaacaacaacagtgatggttttatccattttgtcagaaacaacacggccttggtaaactttgcgttggttacgttcgctcatgctcacgacctcccctcagtgattatttgttggcagcaatttctctttcacgaatcacagttttcatgcgcgcgatagctttgcgcacttcacgaatgcgagcagtattttcaagttgtcctgtcgctaattgaaagcgaagattgaaaagttcttctttaagagactttactttttgttcaatttcagcagtggtaaggtcacgaatttcattagctttcatttgattcaccaccaatttcttcacgttttacgaacttcgttttaattggcaatttgtgagatgcaagacggagagcttcacgagctacctcttcagacacaccagaaatttcaaataaaactttgcccggttttacaacagctacccagccttcaggagcccctttaccggaacccatccgtacctcaagcggtttagcagtgtaaggttttgaagggaaaattttaatccaaactttaccgccacgtttcatgtaacgagtcatcgcaatacgtgcagcttcgatttggcggttcgtgatccaagaagcttcaagagcctggataccgtactcaccaaaatgtacttcagtaccgcctttagcgcgaccgcgcatttttccgcgatgctctctgcgatatttaacgcgttttggtaataacatattattttcctccttcctcagttttcttcttagtaggaagaacctctccacgatagatccagacttttacaccaagcttaccgtaagttgtgtcagcttcagatgttgcatagtcgatgtcagcacgtaaagtgtgcaatggaacagttccttcactgtagtattcagaacgagcgatatcagctccgccaagacggccggaaaccattgttttcacaccttgtgctccagcacgcatagtgcgttggatttgttgtttctgcgcacggcggaaagaaatacggttttctagttgacgagcgatgttgtcagctacaagctgagcatcaagatctgctcttttgatttcaagaatgttaatgtgtacacgcttgccagtaaggctgttaagggctttacgaagtgcttcaacttcagatccgcctttaccgattaccataccaggcttagcagtgtggatcgtaatgttaacgcggtttgctgcacgctcgatttctactttagaaacagaagcgtcagaaaggcgtttgctaatgaattcacgaatttttaaatcttcgtgcaggaagtcagcgtaatctttaccagcgtaccacttagattcccaatcacgaatgactccgatacgaagaccgactggatttaccttttgacccactacttatccctccttcttttctgatacaacgattgtaatgtggctcgtacgtttgttgatttggctcgcacgtcccatagcacgcgggcggaatctttttaacgttgggccttcgtcaacaaatgcctgagaaataaccagattgttagcgtccatctcgtagttgtgctcagcatttgcgatagcagattttaaaactttttcgatgatcggagaagcagctctcggagttaggttcaagatagatactgcttcgcctacttgcttacctcgaatcaggtccattactagacgtgctttacgaggagcaatacggactgttcttgcaacagctttagcttgcatttaaaagcctcctctcttagcgtcttgtttttttatcgtcactggcgtggcctttgtaagtacgagtcggtgcgaattcgcccaacttgtggcctaccatgtcttcagaaatgaatacaggcacgtgtttacgtccgtcatatactgcgatagtgtgaccgataaattgtgggaaaatagttgaacggcgagaccaagtttttacaacttgtttcttgtccgtttcatttaatttctcgatttttgtcatcaagtgtccatcgacaaatggtccttttttcaagctgcgagccattttggaacctcccttcgtgattgcactacggtccgaaatgaaccgtagacaaccccgttatttatttttacgacgacgtacgataaatttatcagatttgttctttttcttacgtgtcttgaatccaagagtcggtttgccccaaggagacattggtgatttacgtccgattggcgcgcgaccttcaccaccaccgtgcgggtgatcgttagggttcattacagaaccgcggactgtagggcggatgcctttccagcgagagcgtcctgctttaccaacgttgataagttcgtgctgctcgttacctacttgaccgatagaagcgcggcaagcagaaaggatcatgcgaacttcaccagagttaagacgtacaagaacgtatttgccttctttaccaagaacctgagcagatgtaccagctgaacgtacaagctgtccgcctttaccaggttttaattcaatgttatgcacaactgtaccaacagggatgttgataagcggaagtgcgttacctactttgatgtcagcttcagggccggacatgatttcagtacctacttgaattccttttggagcaagaatgtaacgtttttctccgtctacatagttgattagtgcaatgttagctgaacggtttggatcgtactcaactgtagcaacgcgtccaggtataccatctttatcgcgtttgaagtcgataacacggtattggcgtttgtgtccgccaccttggtgacgtacagtcaatttaccttggttgttacgtccgccttttttgtgaaggggcgcaagcaaggatttttccggctggtcagtcgtgatttcagcaaaatctgaagttgtcatgccacgacgtccgttagaggtcggtttatactttttaatcgccattttgaatttccctccttctttttacagataattaagcttcaaaaatttcgatttctttgctgtctgcagtaagttttacgatcgcttttctgcgacggctagtcataccagtatagcggccgacacgttttgatttccctttgtagttcatgatgttgactttgtcaactttcactccaaagatactttcaactgcatctttcacttctgttttattagctcttacatcaacttcaaaagtatatttcttttcagtcattaaatcagcagaacgttcagtaatgacggggcgcttaagaacatcacgaggatctttcattatgcaagcacctcctctactttttcaaccgcagcttttgtaatcagaagcttctcgtggttgacaacgtctaacacgttgattccgttagcttgaacaactgtaactccagggatgttgcgtgcagaaagagatactgcttcgtttgcatccgcagttacgattaaagcttttttctcaacagataatcctttaaggacagctgccatttcttttgttttaaccgtatcaagagtaagatcttcaagaacaataatgttgttgtcgttcactttagaagacaatactgatttgattgccaagcggcgaacttttttaggtaatttgtaagaatagctgcgtggtgttgggccgaatacgacaccacctccgcgccattgcggtgaacggattgaaccttgacgggcacgacctgtacctttttgacgccatggtttgcgacctccgccgcgtacttcagaacgattttttactttgtgagatccttgacgtaaggaagctctttgcataagaatagcgtcgaatactacgctctcatttggctcaattccaaatacagaagcgtttaattcgatatcaccagcagtagaaccgttttggttgtataatgctacttttggcatgatcaatttcctcctttcctaagagacttatttagatttaacagcacttttaacagtgattaaagcttttctcgcaccaggtacgttacctttaatcaaaagaagattgcgctcagcatctacttttacgacttcaaggttttggacagtgatttgatctccgcccatgcgtccaggtaatagtttacctttgaatacacggttaggatctacaggtcccattgaaccaggacgacggtggtagcgtgaaccgtgagacataggtccgcgagattgtccgtggcgcttgattgcaccttggaaacctttacctttagatactcctgttacatctacgatttctcctgcagagaaaatttcaaccttgacttcctgaccaatttcatacgcatccatatccacgccgcgtaattctttaacgaagcgcttaggagcagtttccgcttttgcaacgtgtcctttttccggtttgtttgaaagcttttcgcgcttatcgtcaaaaccaagctggatcgcttcatagccatcattttcagctgttttcttttgaagaacaacgtttggagctgcttcaataacagttaccgggataagatcaccgttctctgcgaatacttgcgtcataccaatttttcttcctaagattcctttggtcattcgtcacacctcctattaagatcattctatattttagaattaaagtttgatttcgatatcgacaccagatggtaagtctaatcgcatgagagcatcaacagtttgtggtgttgggttcacaatgtcgattaaacgtttatgtgtacgcatttcaaattgctcacgagaatctttgtatttgtgcaccgcacgaaggattgtgtaaactgatttttcagtcggcaacggaatcggaccagatacgctggcaccagaacgttttgccgtttcaacaatcttctctgcagattgatcaaggattctatgatcatatgcttttaaacgaatacgaattttttgttttgccattattttccctccttttcgcctacatcacgttagacagttctccgtgagaaaaacctgatcaccttgccatggcaaagcggccgggtgtgtcagcaacctctcacttcatcgcagtcaaagaccaacatacactattatacagaaaatagacgcatgttgcaaggtttatttaaagaaccttgtggttttcacactttgattattatacaggtgataccatgattaatcaaggatatgactgttttctttcagagatggaacgatgcgaaccggctgacaacttcggcaaagcgatccggttcctccaagtgaggcgaatgggctgagttctcaaaccaatgccattctttatacggcgcatcaaccttctgataatattcataagacgtcgtccccggaaccgtcaaatcgtatctccctgacataaaacagcacggtattacaatagaagaaactgattcccctgcatcaaaggaaatgagatcctcccacaggtgtttcaggctgaacatttgtccccgcgcggctaagaagctccctctcacaccgtacggttcaccaaacagcattcgcccccctgctttaagagcgccgatcggatgatgggtaaagccccctcccctcatttcaatacaaagcagaaacagcgttcgctgcagctgtttctcccatgggggtgctccgataaagctcagcgtcttgcccagcaggatatgtttgtgttgcctgctccattccatcatcaaccggtaggcttccgtttcttccttttgaatattaaccacctgactgataccgatatacgcataatacaaatcaggtttctcttgaagaacttgaagcgccaaaactgaaccccacgaatagccggcgatatatatttttctcctgctgaattgcttgcataagcgttcggtcagatgaatggtgtcagctgtcagctgatccaaagtcatagatgaacccggaatttcctttgaataagagagacccgcccctctctgatcccagttcacaacggtgaaatgcttttccagctcattctggtattttctcgcataaccgatttgaggcgtgccgggaccgccatgcaaaaacaaaagcagcggactactcctgtcatcaccattaatcataatggtttgttcactgccattaatctgcaattgctgaagcattgaaatacgattggttttcttgaagttatcgttcatcggtctgctcctaaaatttgtatacgttctattatacatggaatcagcagggaaacaaaaaaacgaggccccataagggaccccgcattattgaacgagtcgattactcagtgattgtagaaacaacgcctgaaccaactgtacgtccgccttcacgaatagagaaacgagttccttcttcgatagcgattgtagagataagttcaacgatcatttcagtgttatctccaggcataaccatttctacgccttctggaagattgatgataccagttacgtcagttgtacggaagtagaactgaggacggtagttagagaagaatggagtatgacgtccaccctcttctttagaaagaacgtaaacttcagctttgaatttgctgtgtggagtgattgtacctggtttagcaagtacttgtccacgttggatgtcttcacgagctacaccgcgaagaagtgcaccgatgttgtctccagcttcagcgtagtcaagaagcttacggaacatttcaacacctgtaacagttgttttgctgttttcttcttgaagaccgatgatttcaacttcgtcaccgactttaacttgtccgcgttctacacggccagtagcaactgtaccacgaccagtgattgagaatacgtcctcaactggcatcatgaatggtttttcagtgtcgcgttctggagttgggatgtactcatcaactgcagccataagttcaagaattttttcttcgtactcagcatcgccttcaagagctttaagagcagaacctttaacaactggtacatcatcaccagggaagtcgtattcgctaagaagatcgcgaacttccatttcaacaagctcaagaagctcttcgtcgtctaccatgtcgcatttgttaaggaatactacgatgtatggtacaccaacgtttttagaaagaaggatgtgctcacgagtttgtggcattgggccatcagcagcagatactacaaggatagctccgtccatttgcgcagcaccagtgatcatgtttttaacatagtcagcgtgtcctgggcagtcaacgtgtgcatagtgacgagtgtcagtttcgtactcaacgtgtgcagtagagattgtgataccgcgctcacgttcttctggagcaccatcaatttgatcgtacgccatagctgtacctttaccagatttcttatgaagtactgttgagatagcagcagttaatgttgttttaccatggtcaacgtgtccaattgtaccgatattggcatgtgatttggaacggtcgaatttttctttagccattctaaaatcctccttaagagcttttaattagtaatgtatagagtgatagaaagtgaaagcaagctctcacttcctcatcttacaatagtagttatacttgagttaagtggcaaaatcaattattcgcctttattttttttgataatttcttcagcgatgctcttcggcacttcttcgtagtgatccatgaacattgtgaacgtaccgcgtccttgcgtgttagaacgaagggcagtagcgtaaccgaacatttcagcaagaggtaccatcgcacgcacaacttgagcgttaccgcgagcttccataccttctacgcgtccgcgacgagaagtaacatcacccatgatgtctcccatgtattcttcaggaataacaacttcaactttcatgattggttcaagaagaactgggttacatttgctgactgcatttttcaatgccatagaagcagcgactttaaacgccatttcgtttgagtcaacatcatggtaagatccatcaaaaagtttcgccttgatgtcgattagcgggaatccggctaggacaccattttcaagagagtcttcaagacctgcttgtacggctgggatgtattcacgaggaacaacaccaccgacgattgcgttttcgaattcaaagccagcgccttcttcgttcggttcaaattcgatccaaacgtgaccgaactgaccgcgtccgcctgattgacgtacgaatttaccttcaacttttgcaccggtacggaatgtctcacggtacgcaacttgaggagcaccaacgttagcttcaactttgaactcacgcttcatacgatcaacaatgatatcaaggtgaagctcacccataccagagatgattgtttgacccgtttcagggttagtttgtgtacggaatgtaggatcttcttcagcaagtttcgctaaagcgatacccattttatcttggtcagcttttgatttaggctcaatcgctacgtcgataacaggctctgggaattccattgattcaaggattacaagatccttttcatcacacagagtatctccagtagaagtatcttttagacctacagcagctgcgatgtctccagcgtaaacagtagagatctcttcacggctgttagcgtgcatttgaaggatacgtcctacgcgctcacgcttgccttttgtagagttctttacatatgaaccggaatcaagtgtaccggaatatacgcggaagaatgtcagcttaccgacataagggtcagtcataactttaaatgcaagtgcagagaacggctcttcatcagaagaatgacgaacgatctcttcatctgtatcaggacgaacacctttgattgcagcaacatcagttggcgcaggaaggtagtcaagaacagcatcaagtacaagctgaacacctttgtttttgaaagcagaaccaacaagtacagggtagaattcaacattcagtgtacctttacggatagcagctttcagttcagggatagtgatttcttcaccttcaaggtacttttccataagctcttcatcaagctcagctacagcttcaatcaggctgctgcgaagctcttcagcttgctctttgtactcttcagggatttctttcgcatctgaacgagttccaaggtcatcttcgtagaaatacgcaacgttttctactaagtcgatgataccttcgaagttgtcttcagcgccgatcggcaattgaattgcgtgagcgttagcttgaagacggtctcttaaagtgcctacagagtaaaggaagtctgcgccgattttgtccattttgttgacaaatacaacgcgcggtactccgtaagttgttgcttggcgccatactgtttctgtctgaggctcaacacctgattgagcatcaagtacggcaaccgcaccatcaagtacacggagtgaacgttcaacttcaactgtgaagtctacgtgtcccggtgtatcgatgatgtttacacggtaacctttccactgtgcagtcgttgctgcagaagtgattgtgataccgcgctcttgttcctgctccatccagtccatttgcgaagcaccttcgtgagtttcgccaattttgtggatacggcctgtgtagaacaagatccgttctgtagtagtcgttttaccggcatcgatgtgagccatgatcccgatattacgagttttttctaaggagaactctcttgccattgggtaatttctccttccttattagggaattattattttgattatatgaatcctaccagcggtagtgagcaaatgctttgttcgcttctgccatcttgtgagtgtcttcacgtttcttaacggcagcaccagtgttgttagctgcatcaagaatttcgttagccaggcgctcttccattgttttttctccgcgaagacgcgcatagttaaccaaccagcgaagaccaagagttgtacggcgttcaggacgaacttctacaggcacttggtagttagctccacctacacggcgtgcttttacttcaagtacaggcatgatgtttttcaatgcttgttcgaaaacctccattgcatcattgccagtgcgttctttaatgatatcgaatgacttgtataggattgtttgagatttaccttttttaccgtcgatcatcattttgttgatcaggcgggataccagcttagagttgtaaagcggatcaggtaaaacatctctttttgctacaggacctttacgtggcatctgaatatcctcccttcatagttttaatgatttattattattactttgctttaggacgtttcgtaccgtatttagaacggccttgcgcacggttttcaactccggcagtatcaagcgcgccacgaacgatgtggtagcgtacccccggtaagtcttttacacgtccgccgcggatcagtacaacgctgtgctcttgcaggttgtgaccgataccaggaatgtaggcagtaacctcgattccgttagtcaaacgaacacgagcatatttacgaagtgctgagttcggttttttcggtgtcattgtaccgacacgagtacataccccgcgtttttgtggagaagatacgttagtgtgctcttttttaaagctgttgtatcctttgtttagtgcaggtgacttagagttttcaactttgctcacgcgtcccttgcgaattagctgattaattgtaggcatgttgtgttcctcccttcattacgttttataacccacatacccaggtggttcatcattaggcaaaaaaacaatgtctttacataagattgatatcttatataaaaacaaaaagtacgctataacataatggcaacagctgctgctcccacttcaattccgcaggctttgccgagctttttcatggaatccaccatacagacagcggtattttggttctttgcaagctggataacgccagccgtaagaactgaatccgcgtcttttgccacgacgacttccttcactgaacctcgttttagagctttcactgtttgcttcgtaccaataataattgatttggcctgtgatactttatcataagacataaacatatcctccaaagtaacaggttttatttcgagcaccttggttatattatcactctgcgggacggatgtcaacaacgtatgacattttttagtgcagtcccccgccagaataattgtaatactgaggaaaagctgtcgaaacagcctttcctgcagcagtttctgttattcagccggaaccatatcttccgaaggctgaacgtttgaaacaggttttacttttctgtaattcatcatacctgtaccggccggaaccagtttaccgatgatgacattctctttcaggccgagaagttcatcacgcttgcctttaatcgcagcatctgtaagaacgcgtgttgtttcctggaatgatgcggcagacaagaatgaatccgtctcaagtgaagctttcgtgataccgagaaggacaggacggcctgtagcaggtcgattgccttcaagcagcacttttttgttcgcttctgtaaattggtgaatatcaagcaatgtgccagggagaacatcagtatctccggcatcgattacacggactttgcgaagcatctggcgaaccattacttctacgtgtttatcgccgatttcaaccccctgcatacggtaaaccttctgaacctcatgcagaagatattcctgaaccgttgtcaggtcagtaactttaagaagttctttcggatcgattgaaccttccgtcagcacttgaccgcgggtaatctgatcaccctcagtcactttcaggcgtgagttgtaaggtgccgtgtatgaacgggtctcaacagcaccctgaacaacaatctcctgctgtttgtcgcggacttcattgatttcggcaattgtaccgtcaatctcagaaatcgtcgcttgacctttcggattacgcgcttcgaaaagctcctggatacgcggaagaccttgtgtgatatcgtctccggcaaccccgcctgtgtggaacgtacgcatcgttaactgtgttccaggctcaccgatagattgagcggcgataatacctactgcttcgccgacttcaacatcagttccggttgcaaggtttcgtccgtagcatcgtttacatacaccatgaggagtgttacatgtgaacgcagaacggatccacacttcttcgattccggcttcaacgatttccagcgctttatcttcatcgatcaattcattttcgttaatgagcacagcacccgtttcaggatgtttgatctgttttctggcgaaacgtccgatcagacgctcttccagacgctcgatgatttccgtgccttctttgagcggttttgcaagaataccgcggtctgttccgcaatctgtttcacgaatgataacatcctgcgcaacatcaacaagacggcgtgtaaggtaacctgagtcagctgttttcagggcggtatcggcaagacctttacgcgcaccgtgagtggagataaagtactccaatactgtcagaccttcacggaaacttgatttaatcggcaattcaatgattcgtccagccgggttggccatcagaccgcgcatacccgcaagctgtgtaaagttagatgcgttaccacgggctcctgaatcactcatcatgtagatcgggttgacttcgtctaatgatttcatcagtttgccttggataacatctttcgctgaactccaaattgaaatgactctttcataacgttcttcttcggtgattaaaccgcgtctgaactgtttcagaacattatctactttgctttgtgcttcttcaaggatttcctgtttatcatcgagaacgacgatatcagaaacccctactgtgatgccggctttcgttgaatatctgaaaccgaggtttttcatgcggtcaagcattttagacgtttccgtgatatggaatcgtttaaagatttccgcgatgattttacccaaaataccttttttaaacggtgcgttgatcggctgctcagcaatcacagcttttacgtcagcacctttatctaagaagaaacggtcaggtgtcttctcttcaatgttgctcttcgttggttcattcatgtaagggaatgattccggaagaatttcattgaagacgagcttaccgacagttgtaattaacaattttgaacgctgttcttcagtaaatgtcacattcttaagggagttcgctgcaacagctactctcgtatgaagatgaacataaccgttttgataagcaagaagcgcttcgtccgtatttttgaaaaccataccctcgccgactgctccggcgcgctcaagcgtcaggtagtagtttcctaataccatatcctgagacggcgtaacaaccggtttaccatctttagggttcaagatgttttgggccgcaagcatcagaatgcgcgcctcagcttgagcctcagctgataaaggtacgtgaaccgccatttggtcaccgtcaaagtcagcgttataagctgtacatactaacgggtgaagacggatggcgcgtccttcaacaagcgtcggttcgaaagcctggatacctaatctgtgaagagtaggggcacggttcagtaagaccggatgctccttaatgacagattcaagtacatcccatacttcaggctgcacgcgttcgattttgcgttttgcgctcttgatattgtgagcaaggcctttttcaacaagctctttcatgacgaaaggcttgaagagctcaagcgccatttccttcggcaaaccgcactgatacattttcagatgcggacctacgacgataacggaacggcctgagtagtctacacgtttaccgagaaggttctgacggaaacgcccttgtttccctttcagcatgtgagaaagagatttaagcggacggttacccggtccggtaaccggacggccgcggcgtccgttgtcaatcagagcgtcgactgcttcctgaagcatacgtttttcgttctgaacgatgatgcttggcgcgccgaggtctaacagacgttttaaacggttattacggttgatgacacgacggtaaaggtcgttcaggtcagacgttgcgaaacgtccgccgtcaagctgaaccatcggtcttaattcaggcggaataaccggaagcacgtcgagaatcatccaagacggcttgtttcctgaattacggaaggcttcaagcacttcaaggcgtttgatcgcgcgtgtacggcgctgtccttgagaagtcttcagctcttcttttaacatatcaacttctttgacaaggtcgatgtcctgcagaagtttattaatggcttccgcacccatagaggcttggaatttgtttccgtacttatccagatacgcacggtattccttttcagataaaagctgtttcttttcgagcggtgtattggccgggtcagttacgacgtaagaagcaaagtaaataacttcttccagcgcacgcggtgacatatccaatacaagacccatacggctcggaatacctttgaaataccaaatgtgagaaaccggggcagccagttcaatatgccccattctctcacgacggactttagcccgcgttacttcaactccgcaacggtcacaaactacgcctttataacgaacccgcttgtacttgccgcaatgacattcccagtccttagtcggtccgaaaatgcgttcgcagaacaggccgtccttttcaggtttcaacgtacgatagtttatcgtttcaggctttttcacttcaccaaaagaccatgaacggattttatccggtgaagcaagaccgatgttcatatactcaaaattgttcacatctagcaaggggcctacctccctttttatcttcggattaaccgatgtcacttgcctttatcaatcagagactattctttcgttactgcgtcacgttcaacgtctggagatgctgtttcttccggcgcttcatcacctgataatgcaaggccgtcagcctgtttcgcatcttcctcgtcttctagatctctcatttctatttcttcttcatcgcctgagaggatttttacgtccatacctaagctttgaagctctttgatcaatactttgaatgattccggaacaccaggctctggaacattgtcgcctttgacgatggcttcatatgttttcacacgtccgaccacgtcatcggacttcacagtcaggatttcttgaagcgtgtaagctgcgccgtaagcttcaagcgcccaaacctccatctcaccgaaacgctgtccgccgaattgggctttaccgccgagaggctgctgcgtaacaagtgagtaaggacctgtagaacgggcatgaagtttatcgtcaaccatgtgagccagtttgatcatgtacatgattccgactgatacacggttgtcgaacggttctcccgtacggccgtcataaagaactgttttagcgtctcttgacatgcctgcttcttcaagtgtttcccacacatcttcttcacgcgcgccgtcaaatacaggtgacgcgatgtgaatgccgaggtagcgggcagccatacccatgtgaagttctaatacctgaccgatattcatacgtgatggtacacccagcgggttaagcatgatatcgatcggcgtgccgtcaggaaggtaaggcatatcttcttcaggaagaatcttcgagataacccctttatttccgtgacgtccggccattttatcaccttcagaaatcttacgtttctgaacgatatatacgcgtacaagctggttcactcccggaggaagttcgtcgccgtcttcacggttgaagacttttacgtcgtggataattccgccgccgccgtgaggcacacggagagaagtatcacggacttcacgcgctttttctccaaagatcgcatgaagaaggcgttcttcagccgtaagctcagttacacctttaggcgttactttacctacgagaaggtctccgtcgttgacttccgcgccgatacggataattccgcggtcatcaaggttgcgaagcgcgtcttcccctacgtttggaatatcgcgggtgatctcttccggcccaagctttgtatcacgtgcttctgattcatattcttcaatgtgaatagatgtgtatacatcatctttcacaaggcgttcactcatgatgatggcatcctcatagttgtaaccgtcccatgtcatgaagccgaccattacgttgcggccgagagcaagttcaccaagctccattgaaggtccgtcagcaaggatttctcctttgactacttcatcgccgacacttacaatcggacgctggttgtagcacgtaccttggttggagcggacaaatttcagcaagctgtacttatccaggttgccttttactttttggccgtcaatttcttcatagcggcgcacccatacgtttttcgcttccacccgttctacgataccagggtgtttacaaataacggctgcaccggagtctttaccggatacgtattccatacccgttccgacgatcggagcttccggctgcatcaaaggcacagcctgacgctgcatgttcgctcccatgagggcgcggttcgagtcatcgttttccaagaacggaatacatgctgtcgcagcagaaacaacctgtttaggagatacgtccatgtaatccacgcggttgcgggctacaacggtgttttcccctctgaaacgcgctacgatgctgtcatccaagaaagaaccgtcatcgctcagcttagcattcgcttgggctacgacatagttatcctcttcatcagcagtcaggtagtcgattctaggcgttacttttcctgtttcaggatcaacgcggcggtatggcgtctcaatgaaaccaaagcggtttactttcgcaaatgatgacaatgagttgatcaaaccgatgttcgggccctcaggcgtttcaatcggacacatacggccgtagtgagagtagtgaacgtcacgtacttccatacctgcgcgctcacgcgtcaaaccgcccggtccgagagctgacagacggcgtttgtgcgtcaattcagcaagcgggttcgtctgatccatgaattgagaaagctgtgagcttccgaagaactctttaatagacgcaataacaggtctgatgttaatcagctgctgcggcgtaattgtattcgtgtcttgaatagacattctttcacgtacgacacgttccatccggcttaaaccgatacggaattggttttgcaggagctcacctacagaacgcagacggcggtttccgagatggtcgatatcatcagtgtcgcccactccgtgcaggaggttgaagaagtagctgatagaagaaataatatcagcaggcgtaatgtttttaatcgcctcttcgatgtaagcattgccgatcacattgatcgtctgctctccttctgcatcagtaggagcatagattttaatggattgaagcatcacttcatcctcgacaacgccgccgttaggataaagttttctgaagccgattccattttctaagtatggcaatactttatcaagtgttcttctgtcaagaatctgccctttttcagcgagaatttcaccggtttccggatccaccagtgtttctgcaaggcgctggttaaacaggcggttcttgatatgaagctttttattaattttatagcgtcctacattcgcaaggtcgtatcgcttcggatcgaagaaacgggaatccagcaagctttttgcgttttctactgtaggcggctctccgggacgaaggcgctcatagatttcaagaagcgctttgtcactgttttcggtgttgtccttatccagtgtattgcggagatattcgttctcaccaatgagatcgagaatctcttggtcggaaccgaagccgagagcacgcaaaagaaccgtaaccggcaacttacgtgtgcgatcaatgcggacatacacaacatctttcgcatcagtttcgtattctaaccatgcgccacggtttggaatgacagtcgcggtaaaaccttttttaccgtttttgtctactttaccactgaaatatacacttggagaccgaacaagctgagatacgataacacgttctgcaccgttgatgataaaagtaccggtatctgtcataatagggaaatcacccatgaagacatcctggtcttttacctctccagtttctttgttaattaaacgaaccttcactcttagcggagctgagtaagtcacatcacgttcttttgactcttcaacgggatacttaggatctcctaaactgtagtcaatgaactctagagagaggttaccagtgaaatcctcaattggtgatatgtcttgaaacatctctctaagaccctcatcaagaaaccactgataagaagaggtttgaatttcaatgagatttggtaattctaacacttcgctaatgcgagcatagcttctgcgctggcggtgtcgtccatactgaactagttgacctgtcaactgattcacccctcaaatcatgcgtattatatgtgtaataagcatctcttacgataaagaaatacttttacaagacaaaagaaaaaagggtttctaattaagaaaaccacatccaaaaacaaataccgattttattagcatttccatgtttgtataatttatacatgcactatgattatttgagcatatcatgcaaaatatatacattggcattttacaatattaacatagctgaaaattcaagtcaaactttttttgcttttatgatataatagcctttctttttttgaaccacagaaacttcgtcaaaaagctccttcagtttttcaatggcagaaggcccgccctgttttttctgtataacgatccacaattcacctgaagcccttaaatgctcagcgcttttttcaaaaatggcatggacaactttttttccggcgcggattggggggtttgtaataatagaagcaaatgtttgagcagaatcaatatttgaaaataaatcactctgataaatccgaacgttttttattccgtttttttctgcattttcatttgacagctctacggctctttcattcacgtcaatcatgtgcacggtccggtctgtaaatgcaccggcgagcgacagaccgatcgggccgtaaccgcagcctgcatccaggaagtcaccatcgatctccggctcttcaaacgcttcaattaagacacgcgaaccgaaatcaacttcctttttcgagaaaacgccgctgtcacttgtgaatgtataagatctgttccgcagtgtaaatgaccatgtctgtttatcgcttttaactgaaggtttttctgaataatagtgttcactcattattagaacctccttttttaattgcacttaaagaaaagcaaagaaaaagcccgcctcataaaagcgagcttcccctacaggcaagtgaagattacttaacttctacagaagcgccaacttcttcaagtttagctttaagctcttcagcttcttctttcgcaataccttctttaagtggttttggagtgttgtcaacaagttctttagcttctttcaagccaagaccagtgatttcacgaacaactttgataactttgattttctgagaacctgcaccagcaaggataaggtcgaattcgctttgctcttcagcagcgccgccagcagcagctccgccagctacagctacaggagcagcagcagttacgccaaattcttcttcgattgcttttactaggtcgttcaattcaagtacagttgcttctttaacggaagcaatgatttcttcgatatttaaagccatttgaaattcctccatttgttttattttagggtaaaatcagattaagcgccttgttcttccttttggtctgcaactgctttagctgcaagtgcaaggttgcgaactggagcttgaagtacgctaagcaacatagaaagtaagccatcgcgtgaaggaagttcagcaagagctttcacttcttcaacagaagatacttttccttcgataacgcccgctttgatttccagagcttcgtgatttttcgcgaactcgttaagaacttttgccggagcgacaacatcttcagtactgaatgcgatcgcattcggtccagttaagacatcattcaaaccatcaagttcagcttgttcaaccgcacggcgagtcattgtgtttttgtacactttgaactctacgttagcttcgcgaagctgtttacggagttcagttacttcagaaacgttaagtccgcggtagtcaacgatgatcgttgatttgctttctttcagtttagaagcaatctcttcaacaacaactttttttgtatcaattgcgctgctcatggttacacctcctgtagattttgtgtaacacttataccgctaggtgatcacgactgtgacgacgatttcatataaaaagcctccatgtggacatggaggctgtatatacaagcatacgtaacgtaatagctgtgatatatatacacctcggcaggatattaagcctcaacggcccctgctgtctacggtataaatgacatattatattttacaacattttgaatcatatcagaatgctgatctaaagtcaaatattattttacgttgaaagtagaagcgtctactttgacaccagggcccatagtagaagtaacggcaacgtttttcacgtaaacacctttagccgcagccggttttgctttcaggattgtatcatacattgttgtgaagttctcaacaagtttttcatcctcgaaagaaacttttccgatcggaacatggatgttaccagctttgtcaacgcggtattctactttaccagctttgatttcgccgattgctttttctacttcgaatgtaacagttcctgttttagggtttggcataagaccttttggtccaagcacacggccgattttaccgacttcacccatcatgtcaggagtcgcaacgattacatcgaattcgaaccagccttgctggattttcgcgatgtaatcagaatcaccgacgtagtctgcaccggcagcttcagcttcttttgctttttcgcctttagcgaatacaagcacgcgctgagttttaccagttccgttaggaagtacaactgcaccgcggatttgctgatcgtttttacgagggtcaacccctaaacgaaaagcaacttcaactgtagcgtcgaatttagctgtgtttgtttttttagtaagcgccactgcttcagcgacgtcgtaagctttcgcacggtctacaagcttcgcagcttcaacgtactttttaccttttttagccattttaaaatttcctccttatgtggttatagcggaataacctcccacgaataagggttgcgaacttgtgaaaactcgcaacccgacaagaaacaaattaatcctcgataacgatacccatactgcgggcagtaccttcaaccatgcgcattgccgcttcaacgtctgctgcgtttaagtcaggcattttcgtttcagcgatttcgcgaaccttatcgcgcttaacggttgccactttattacggtttggttcaccagaaccagactcaattccagctgcttttttaagcaatactgcagcaggcggagtttttgtaataaatgtaaatgaacggtcttcgtaaaccgaaatttcaacaggaatgattaaaccagcttggtcagctgtacgagcgttaaactccttacagaatcccatgatatttacaccggcttgacctagtgcaggtccaactggcggcgctgggttagcttttccagcaggaatttgcaattttacaacttttactacttttttagccacgagacacacctccttaagtccgtgatgtggtaatagggtaaaccctcccactcaaggtttcattctttatatgaatgacgaaatatcaagctagctgccttggattagtccaagacgtacctttgctatattatcattaatatatagcaatttcaagttttttcacattacaatttgtcgatctgggtaaattccagctcaaccggcgtttcacggccgaacatgttaacgaatactttcactttgctcttatcataatcaatctcttcaattgatcctgtaaagttggcgaaaggtccgtctatgactttgactgtctcattcaattcaaaatcaatgtcggttttccgctcatccatgcccatccgctttaagatggtttccgcttcgccaggaagaagcggagtcggctttgagcctgaaccggctgatccgacgaatccggtaacgcccggcgtgttgcggaccacataccaggaatcatcagtcatgacgatttcaacaagcacataacccgggaacactttctttttgactacttttttcttgccgttcttaatatcagtctcttcctcttcagggacgacaacgcggaaaattttatcctgcattcccattgattccacacgtttttcaaggttcgcttttactttgttttcataaccggaatacgtatgaacaacataccaattcttttccattctatcaggactctgcagtccttccctccccgcatttaaaaatgaagtgtaaaacaaaaaataggctcagagcctatgaatccttttttcaacacaataaaaaacccgctgaacgggttttggcaaacgatattatgatctattatagcacgtattgctgatcattattcaactattaaacgaattaattgagaaattcctgtatcaaggagggcaaaaaagataacaaaaaagataaccgttgaaatcaccgtgatcgtatagcgcgttaactctttgcctttaggccagctaacctttttcatttctttcccaacatctttaaagaaactcatcatgcgcatgtaaaagacctccacaatttaaaaagcgaacactattttgtttctaaatgagctgtatgtgaattgcaagtgctgcagtacttcttaacttctaaccgctcagccgctgatgcagagcttttcattgtcgtataattacgatttccgcatgttttgcatgccagcgtaatcttttttctcatgtcgttacaccttttcctaaacaatcatttatcttaataaaatagcacagtcagaaaaattctgtcaatatgacacagaaacccgctacagactgatttctcttatttccaaatacttttcaagcttgcgcttcacgcgctgcagggcattatcgattgattttacgtgtcggtttaaatcatctgaaatttcctggtaacttcttccgtccaagtacagaacaagcacctttctctccagatcgctcagcagttctcccattttcatttcgatatcatcaaattcttcctgattaataatcatctcttcaggatttaacgttttagcgcctgaaatgacatcaagcagtgttctgtcagattcttcatcaaaaataggtttgtctaaagaaacataggaatttaaaggaatgtgtttctgacgggtagctgtctttattgcggtaataatctggcgggtaatgcataattctgcaaaagctttaaatgaagtaagcttgtcctctctaaagtctcggatagacttatataagcctatcatcccttcctgtacaatatcttctctgtcggcccctattaaaaaataagaccttgctttcgcccgtacaaaattacggtacttcgtaatcaagtaatctaacgcatcactatccccaacatgaaccttttcaatgacctgctcgtcctccaactggcaaaattgcactttgttgaactttcccttgctgttctgtagattcactgcgatccccccggcgcacgtagatagaaatattatacattaatgggcgaaaaagcgtcaacctaatccagaccgcctcggcgccacttttcaaacgttttcaaaacctcttcggacagctcgattttacccggtggtttttcagaagtgatctttgaaacccgcctttgaatccgccgttctatcgtatccacttccctcagaagctcccgggcggatttgcggagagccccttgtccgaaaatcgcccactgctccgtataatcggaggttgcgacatgaatctgtgtcgcaatattattcagcgcctgggcaagtttctcgatccgctcatccgccgtctcattctcccgtgtaaaaatcacttcgactctgtgattcgtttgttttttctctatgccttttaccagatgtgcgtcaaacaccacaatgactctgattcccgtgtaggactgatattccgccatcttctggatcagtacatctctcgcttcttcaaaactgttcgcttttaaatcctttagctgcggccaagctccaatcatgttgtatccgtctactaacaggatgtccatctgtcattattcccctaaaggattgcgcttccggtagacttcatacatgagaaggccggccgctaccgacgcattcagagacgtgacttttccggccatcggaagtttaatgagaaaatcacatttctctttcacaagccggcccattcctctgccttcgcttccgataacgagcgccaaaggcatcttgccgtccatagagcggtagtcttcccgggcggatgcatccgttccgacgacccaaatcccccgctccttcatttcatcaagtgtccgggcaaggttggtcaccttcacgacgggaatgtgttcaatcgcaccggtcgaagcttttgcgaccgtcgatgtcagtccgaccgctctgcgtttcggaatcacaatgccgtgtgcaccgacagcgtcagccgttctcatgatggaaccgagattatgagggtcttccagctcgtccaatatgagaaagaaaggctgttcgtttctctcttccgctcttttatataattcgtctaattgtgcatattcatatgccgccacctgggcgacaacaccctgatgctgcccctccaccatctgatcgagttttttcctcggtacaaattgaatggtgacgccgcgctttttagcaagctccataacttgctgcgcctgtccttttactgtgttttccgccatccataacttatacagcttgcgatctgactttaacgtctcaatcacagcgttttttcctatgacgtaatcatgttgctgactcatttgttttcctccctgacgtcccgacttgtatagcctcagcaatcagctgattcagtctttcttctcttttctcaagaaaaaggtatccgagtaaagcctcaaaagctgtactatggcggtacgtctgtacatctgtgtttttaggcgtggtccctgatttcgcgtttctgcctcttctcagcacggcttcctcttcctccgtgaaaaaggattcgtcctgaaggcggaacaatatgtctgcctgtgattttgccgatacaatccggctcgccttcttatgaaggtcattcggtttcgtaaagccctgcttaagcaggtgatgccggacgtatatttcaaaaatggcatcacccatataagcaagcgcaagaccgtttaactgctttgaatctttgatttgttcaaattgaagcatccgcttattctccccgcttccagcgagttccctgggctgtgtcttcaagaatgatattcatgcttttcagctgatcgcgaatctggtctgacaaagcgaaatcgcgattgcggcgggcttcatttctcttctcaatcaactcttcaatctcttcgtcgacaagctcttcttcgccgagcgtaagtccgagaacagatccgattctgtcaaacatgctgataaaggctttaatgacgtgatccgccgtattgtcttcctgcatgtagtaattggcgagcttcgccagatcaaaccaaacggaaatcgcattcgccgtattaaaatcatcatccattgcttcttcaaacgaagcgcggtgctcttcgattttagcgagccattcctcatcattgtcagtcagattcgtgctgctaatcaaacgatggtttaaattactgtatgccgtcttgaggcggttaaacgcgttttttgttttctcaagcagctcttccgaatagttgatcgggtggcggtaatgaacggaaagcatgaaaaatctcaaaagctgcgggtcatattgcttaatgatatcgtgcaccaaaacaaagttgccgagcgattttgacattttctcattatcgatattgatatatccgttgtgaagccagtattttgcgaatgtcttgcctgttaatgcttcagattgcgcgatttcgttttcatggtgcgggaatgtcaggtcctgaccgccggcgtgaatatcgatttcgtcacccaaatactttttcaccattgcggagcattcaatatgccagcccgggcggccttttccccaagggctatcccatgaaatttctccgtccttagcagctttccaaagcgcaaagtccagcgcatcctctttcttctcgccgacacggatacgcgcgcctgatctgagttcatcaattgattgctgagatagcttgccgtagccttcgaaggcccttgttttgaaatagacgtcgccttctgattcataagcgtagccttttttaatcagctcgctgacaaattcaataatggcgtccatgttttccatgacccgggggtgaagatccgctttccggcatccgagggcgcccacgtcttcaaaatacgctttaatgaaccgttcagaaacggtcgggacgtcctcgccgagctcgttggccgctttaatcagtttgtcgtcaacatcggtgaaattcgatacgtattgaacatcgtatcctttatactccaaatagttgcgtacggtatcatacacaatcgccggacgagcgtttccgatatgaatatagttgtatacagtaggtccgcacacgtacatttttactttgccttcctcaagaggaacaaatgtttcctttttccgtgtcaatgtattataaagtgtaatggtcatttttggttgatcctttcttttttatcttccagttcagcctgcagttcaaaaatctgctgctccaatgctctaaaccggtcagcaaccggatcgggcaagtcttggtgattgagatcgcgtttgatttttcttccgttctgaatgacgactttccccggtatgccgacaacggtcgaaaagtcgggaacatcacgaagcacaacggagccggcccctactttagaaccctgcccgaccgtaatagagccgagcaccttcgctccggttgcaattaaagcatcatcttttatggtcggatgccgcttccccttttcttttcccgttcccccgagagtgacaccttggaataccgtcacgttattgccgatttcacatgtttcccctatgacgacccccataccgtggtcaatgaaaaaccttctcccgatggtcgcgccgggatggatttcaattccggtaaagaaacgggcaatctgtgatatcaggcgcgccaggaagaaaaatctccgtttatataaagcatgtgcaatccgatgcgcccatatagcatgtaaaccagaataagttaaaacaacttcgaaatagcttcttgctgccggatcttgatcgaacactgtatctatgtcttcttttagcattttaaaaaacacatgcttccccccattctctccccgctccagtctgtttttccgcctataaaaaaagcgcctctgcatgtaaacatgacagagacgcttttaccgcgcggttccactctgtttgaaaaacaagtcaatgttttcccaacttaaaagccggtaacggcggcggccgcctttaaatactgatttccgcagaaatgttcttcaaaggtcttaagggcgcacttctaaaacatgacgcatgaatctctctcagccgatgaagattctttctgtaatggtcattgttttatactcttccctgtcaacaatcgtatatttaaatgcttttcaggcgtctgacggctgtttctctgccgatcagctcaatggcctgcggaagctccggaccgtgtgtctgaccggtaaccgctacacgaatcggcatgaacagctttttgcctttatggcctgtttctttctgaacagctttgattgaggctttgatcagctcaggcgtaaattcttcaagctcttcaagcttcgcagcaaatacgctgagcacttcaggcacctgttcttcttccagaacggcttttgcctcttgattatactcgatctcatctttaaagaacaaatcagtaagctcgacaatttcagcgccgtagctcaattgctcatggtaaagagagattaatttacgaacccattcctgttcttcggcagaaagctcagtgccgacttttcctgctttttgcaggtgcggcagggtcagctcaaccacttgatcaagatccagcgctttgacgtattggttgttgacccatttcagtttatgcatatcaaacagagccggtgacttagacaaacgatttacatcaaaaatttcaatgaattgttctcttgtgaaaagctcttcttcaccgacgggagaccagccgagaagtccgataaagttaaacagcgcttcaggcaggtaacccagctcatcatactgctcaataaactggataattgattcatcacgtttacttaattttttgcggctttcgtttacgataagcgtcatatgtccgaagacaggaatatcccagccgaatgcctggaaaatcatgatctgtttcggtgtatttgaaatgtgatcctcaccgcggagcacgtgcgtcattttcattaagtaatcgtcaatcgcgacggcaaagttatacgtcggtgttccgtcttttttgacgatgacaaagtcgccgatgccgtctgattcaaaagaaatctcgccttttacgatatcgttaaatgcgatgattttcccttccggcacgcggaaacggatgctcggctgtctgccttcggctaaaaactgctcctgctcttcctgagtcaggtttctgtgtttgccggaatagcgcggcatttccccgcgggcgatttgctcttcacgttctttttcaagttcttcttccgtacagaaacatttataagcaagccctttttcaagaagctcttcatagtactctttgtaaatgtcgttacgctcagactggcggtacgggccgtattctccgccgacatccacactttcatcccagtccatgccgagccatttcaaatagttaagctgactttgctctccgccttcaatatttcgctttttgtccgtatcctcaatccggataataaactttccgccttggctgcgggcaaataaatagttaaaaagcgccgttctggcgttaccgatatgcaaatgtccggtcggactcggtgcataacgaacgcgtacttcatttcccatgttcaaatacttcctttcatctcgtctgtagcctctagccgaatatatgtatctattctaccaccaaatagacccggcatcaaaacaatgatcaggctttttgaatcagaacggttgcctgagcggcaattccttcggctcttccggtaaacccgagcttttcagtcgtcgtcgcttttacgtttacttgagagacgtccgcctcaaggccttccgctatccgttttctcatagcatcaatatgcggcgccattttcggcttttgcgcaataatcgtgcagtctatatttccgagtacgtaccctttttcttttacaatgttccagacatgctgaagcagcttaaaagaatcagcatccttgaattccggatcagtatccgggaaatgcttgccgatatctccttcacctgccgctccgagacacgcgtctgcgactgtatgcagcaatacatcagcatctgaatgtccgagcagtcccttttcataaggaatttcaattccgccgatgatgagcggacggccttccgttaattgatgcacatcaaatccttgtccgattctaaacattatgattcccactttccgctttcatgattgcttccgcaaatatcaggtcatccggcgttgtcagcttaatattggtatagctgccttcaacgatactcacctgatatccatcaagacgctcgacgaggctggcgtcatccgtacctaagaagcctttgttttccgcttccatatgcgccgtcttcaataaagaaagacgaaaagcttgcggcgtttgaacggcccacaagcttgaacgatcaaaggtctccgcagcccgggagccttccgcccgttttatcgtgtctttcacaggaacagccaggacagccgctcccgcctcctctgctgtttcaacgagcttatcgatatgctgatgtgtgacaaacgggcgcgctccgtcatgaacaagcacgaccgattccttatcaatcactttcagtccttcgtatacactgtgctgacgctccgcacctccggtaacaagctcaatttccgtctgaatcggaaattggaccagcagctggcgaaaatcttcccgttcactctcgtttatcaccaggattattttctgacagggtgcgtggctttcaaaaacccgcagtgtgtgtataataacgggcgcaccttttaagctgatgaacagcttatttttcccggccttcatccgttttccttgtccggcagccggaataacgacaacatactccatatgaactccctcttaaagagctttctcaagcagcttgggcttggcaaaaatcattcgtcccgccgctgtctgcagtacgctggttacgagcacatcaatatgtttccctatataattgcggccttcttccacaacaatcattgtgccgtcatctaagtaagccacaccttgattatgctctttcccgtccttaatcacctgcacattcatctcttcgcccggaagcacaaccggcttcaccgcgtttgcaaggtcattaatattcagtaccgcaaccttttgaagctcgcatactttatttaaattaaaatcattcgtcacaacgacaccggatgtcagcttcgcaagtttgacaagcttgctgtcaacctcctgaatgtcttcgaagtcgccttcataaatttcaaccgtaatatccagttccttttgaatgcgattcaagatatccagtccgcggcgtcctctgttacgttttaaaacatctgaagaatcagcgatatgctgtaattcctccagcacaaattgaggaatgacaatgacgccttctaaaaagcccgtctgacaaatatctgcaattctcccatcaataataacacttgtatccaagattttcagccttttatcctgttcttcctgctcctcatcagcacttccctttttcttctgcattcttgcagaaatggagaaaagactgatcagttcatcctttttcttaaatccgacttggaagcccagataaccgagaaagaaagccagaaagaccggaatgatggtgctgaatatacggtacggaatattgtccagcggaatcacgtttacaatgagatatgcgatgataagtccaaaaaccaatccgagactcccgaataacagatccggcaccggagctctcagcaaagaatcttcaatccattttacccaattaatcacatattctgtcgtccatatactgatgagaaaaaagataatagcaccaattgcagcagacgtatatgcgtttgttattaaaggtatgtcctgtatatttgacagcacaaacaattcaggtattaaaaagataccgacaacgccgcccacaataatgaagaacgcctgaactattcgttttaacatacctccacctccttttaagtagcattttttcagcagactgtcagagcctacaaattcagaataaacaaaaactaacaataatatacccggattccgacaggtttaagcgatacttaaagctgtctatctatatagtgtttttcctgaaggcgttttaagccttttttgattttttgggcgcgcacttcgccgataccctcgacatcatcaagctcttctacagtggcttccgttatgctgggcaaaaatccgaacgcctcaaccacattttcaacaatcggcatcggcagacgcggaattttgttcagcagcctgtagcctctcgggagcacataatcatcaagattcgtagaagccgggtatccaagcagtttaaacagaatggaatcatccagcagatcatagctggacatatcctggagctcttttaacagcacgaacggatctttgattttttctttgacatagtctttgatgaaaagtgccgcctcttcttccatgtccgtaatcagttcaatcacctgcagacggattaagtgtccttccgttccgagttctttaatatacatattgatttcattttttattcggagcaccatttcataccgatgcatgacagacagcacgtcactgaatgtcacaagctcctcaaactctaatgcgtttagagccgtaattgttttgtctaaaatggttttatacttctcgagcgtttgaatggcctgatttgcctttgttaaaataaaacctatgtcctttagtgtgtacttcatgctgtcctgatataacgtaatgacatttctgcgctcagaaatggcgatgacgagacagccggtctgcttcgccacccgttccgccgtacggtgcctcattcccgtttctgaagaagaaatggtcgcctccggcataagctgtgtattcgcataaagaattttctggccggaatcacttaaaataatggcaccgtccattttggccagctcgtataagtgagcgggcgcaaatgatgtattaatatgaaaaccgccatcgacgacttgctttaccttatcattgtatccgacaacaatcaggccgcctgtatttgcccgaagtacattctctatcccggctctgagcggggtgcccggtgcaacgaactgcagaattgcagacaggtcaagctcttgtttcgccccttttttctctttttccatctattatgatcctcctaatgaagtacgaagcgcttctgcaacatttgctactccgacaacctcaatcccttttggtattgtccacccatctgcattcgcctcaggtatgatcatgcgcttgaagccgagtttcgccgcttcttttacgcgctgttcgattcttgacaccctgcggacttctcctgtcagtcccacttcaccgataaagcaatctgcgggattcggcggtgtatctctgaagcttgaggcaatgctgacggctactgccaaatcaatcgccggttcatccagtttgaccccgccggcgacttttaaatatgcatcttgattttgaagcaaaagacccacccgcttctcaagcacagccataattaacgataccctgttgtggtcaatgcctgtagccatgcggcgcgggtttccaaaactggtcggtgatatgagcgcctggatttcaaccagaatcggtctcgttccttccattgacgcaacgatactcgaacccgatgccccggcagaacgctcttccaagaaaatttcagaagggttgagcacttccgtaagcccctcttcccgcatttcaaagatgcccatttcatttgttgagccgaaacggttttttacggcccgcaaaatacggaatgtatgatgccgctctccttcaaagtatagaacggtatcgaccatgtgctcaagcaatctcggccctgcgatcgatccttcttttgtgacgtgtccgacgataaaaataggtatgccgtttgttttcgcgattttcatcaattcggccgtacactctcttacttgtgatacactgccgggagctgaggtgatatcactttggtaaacggtctgaatggagtctacgacaacaaatgcgggtttcatctcttgtatagcagacgaaatatactccatatcggtttcagataaaacatgtaacatttggctgttgatgccaagtctgtcggcgcgcagcttcgtttgcttcacggattcttcccctgaaatgtaaagcacgctgccggccgtatctgctaattgtgcggatacttggagaaggagcgttgattttccgatcccgggatcgccgccgatcaatactaacgagcctttcacaacgccgccgccaagcactctgttgaattcttcgagctttgtttgaacgcggggttcttctgatgtttcaattgatgtaatgggtgatggtttctggacggtttgaacggagtgggagaaagccgcccgccgattcgccggcgctttttttatggtttcttccaccattgtattccaagccccgcagcccgggcactttcccatccattttgcggattcataaccgcatgagtggcagatgaattttgtttttgatttagccatatatgttgtaagacctcttccttatcgaatatttctctatataacaaagtgaggcatacactcgcttacgtatgcctcatgtttgtcactatattagttcgttttagcagttgtttttacgacaaattcgccgtcctcaacatcaagaacaatgtgttggcctttatcaatattgcctctgaggagttcttctgataaccggtcctccacatgcttttgaatcgctcttcttaacggacgtgcgccgtattccaaatcgacgccctcttctgctacttttgctttggcagcatccgtcagctcgatagagagatcttgttctttcagacgttttgttaactgatcagacataagcgacacgatgtctgtaagatgttttttctcaagggagtggaagacgataatttcgtcaatccggttgataaactcaggtctgaaggcacgcttcaactctcccatgactttgtctttcatgtctttatggttttgtgattcatcctggacattgaagcctacatatttgttgcgcttcagctcgctcgccccgacgtttgacgtcataatcaggatcgtgttgcggaaatccacagtgcgtccttttgaatcagtcaagcgtccgtcttcaagcacttgcaggagaatgttaaacacatcagggtgtgctttttcaatttcatcaagcaatacgacagagtaaggttttcttctcactttttctgtcagctggccgccttcatcatagccgacatatcccggaggagaaccgacaagacgtgaagtcgagtgtttctccatgtattcggacatatccactctgatcatcgcttcctcatcaccgaaaatggattccgccagcgctcttgccagctctgtcttcccaacgcctgtagggcctaagaagatgaatgaaccaatcggacgtttcgggtccttcagtccggctcttgcacgtctgacagcctttgccacggctacaacggcttcatcctggccgatgacgcgggaatgcagaatgctttccatattgagaagcttatctgtttccgtttgggcaattttagatacgggcaccccggtccagctggatacaaccatcgcgatatcctctacagaaacttcggagttctcctggccttgtttttctttccaggtttttttcgtgtcttccacctgttctctcaggcgctgctccgtatcacgaagggaagccgctttttcaaactcctggctctgaacggcagcgtctttttccttgcgaacttcatcgagtttctgctcaagctcttttaagttcggaggcgttgtgaaagaacggagacgcacttttgaaccggcttcatcaattaaatcgatcgctttatccggaaggaagcggtcagaaatataacggtcggacaatttaaccgcggcttcgatcgcttcatcggtaatggatacgcggtgatgcgcttcatagcggtcacggagcccttttaaaatttgaatgctttcatcggctgacggctgatccacctgaatcggctggaaacggcgctcgagagccgcgtctttttcgatatatttacggtattcatcaagcgttgtggcaccgatgcattgaagctctccgcgggccagtgaaggttttaaaatattcgatgcgtcaatcgcaccttctgctcccccgctccgatcagtgtatgcagttcgtcaatgaataaaataatattgccggcctgacgtatttcatccattacttttttcaagcggtcttcaaattctccgcggtatttcgtaccggctacaaccgtacccatgtctaacgtcattacgcgtttatcacgtaaaatttccggcacttcattattgatgatctgctgtgcgaggccttcagcaatcgcagttttacctacacccggttctccgataagaacgggattatttttcgttctgcggcttaatacctcaataacacgctgaatttctttgcttcgcccgataaccggatcaagactgtcttccttcgcaatcgcagttaaatcacgcgccagactgtcaagcgtcggcgtgtttgcattgctgttggtaccggatgcagaagaccccgtctcattgcttcccagaagctgcagcacttgctgtctcgctttatttaagctgacaccgagattattcagaactctcgccgccacgccttctccttcacggatcaatccgagaagtatgtgttctgttcccacataagaatgtcctagctttctggcttcatccatgctgagctcaatgactttttttgctcttggcgtataatgaatcgtttgagacatttcctgtccccgtccgattaagctctccacttctttctgaattttatccgaaccgagtccgagtgcttggagtgctttagccgcaatcccttctccttcacgaaccagacctaataagatatgttcagttccaatattgttatggcctaagcgcagtgcttcctcctgtgccagtgccaataccttttgagctcgctctgtaaaccttccaaacatcatatcgaatcatcctcctgtctatttgcactcatttctaaatgcagcctttccctgataagcgccgctcttctcgcgtctctttcgttcggccgtaatgcaccgcccgaatattgctggagaaaacccggctgtgtcaaaatcatcagttcattaagtatattgcttgatagccctttgatgatcccaaggtctatccccagccgaacgtcagaaaggcatttcgccgtttcctttgattcaatcatacggcagttggataaaacgccgtaagatctgaatacccggtcctccaattcaattttcgaagtttggtaaagcgcttctcgggctgaacgttcctgctcaatcagctgggcagccacactgtttaaatcatctacaatgtcctgttctgattttccgagtgtgatttgatttgaaatttgaaagatatttcctaatgcttcgctgccttcaccgtaaattcctctaacaactaagcctaattggttaattgccggtataattcgattcatttgcctagttaatacaagacccggcaaatgcatcatgactgaagcccttagtcccgtccctacatttgtaggacagcttgttaagtaccctctcttctctccaaaggcgtaatccactttctcctcaatccagtcatcaacctggtttgccgcttttatggcgttgagaagctggaagccggggaagaggcattgaattctgatatgatcttcttcatttaacataatgctgacttcttcattttcagaaagcagacagccgccaaaaggagattccgttaaattcgggctgatcagatgtttctccatcagcacccgtttttccaaaggctgagcttcactcattctgattaaatgaaattgaccgatatcaggcagttccttacctgaaaaatgatcttcgaattgctgaatgatggatgaggcttcttcattcgtataccgggcgggaaactttatattttcaaagtttcgggccaaccgtatacggctgctgagtacaatgtcactttcaggtcccttttgcttcatccaattgcttagtgcgtcctgaataaaatgcttgagcgacattacccttgttcccctcactgtctgtactttttaattcctgctctaacgatcggatctgatccctgacctccgctgctctttcaaactcttcgtggtgtattaaagattcaagttctttttttaacatttccatttgccgtcttacatgcaggtttccgcctattcgttttggaattttcccggcatgcaccgtattcccgctgtgaacttttcgcaagatcggcgtaatttggctgtagaacgtatcgtaacattccgcacagccgaaacgccctgtttttctcagctgctgaaacgtcataccgcatttcttacaagctgtgccttgctctgagtagccgaacatttgagaaccggtgttttgaaatgaggactccatattcagcagtcctgataataaattatgaattgagaacccttggtttccacttatactgtatgaatcgctattttcttttgcacattgttcacaaatatgaacttcttgcttttctccattaacaactttcgtaaagtgaaaagtggccggtctctcattgcattcttgacaaatcaatcttttcacccgcttactttagttttaaagatgtgagcattgctttcatcattctggctcttagttcatcccgttcgggcaaatcaatatatagaactgaacgatccattacactcaccatcattttagcttctctttccgaaataactccgtcctctaacagtctgagaataatgtcatcagaggctgcctgggacaagtgggtatggatctgcgaaataatattattgatgaggacgacttcgttattcattttaattttgataatacgaatataaccgccgcctccccgtttactttcaacaatatatcctctttcacttgtaaatctggtgttgatgacataatttatttgggaaggaacacattgaaatttatcagcgatttcactgcgtttgatctctaaaatttctttgccattttgatctaatacttgtttcaagtactgttcaatgatgtcagaaatattatgtcccactcaaccccctcctttattgactttgactatatttgactttaatcttactataaggtgtttcgcaaaatttttcaactgtatcgctctatctctattatttccactttacacaagcataaaacctgcttttgcaaaaagccatatcgttacttttctcatactatataacgtatgcagaaaaacacaaaaaaggcagctcatgatgagctgcctttaccgtaaatatagcttggcggcgtcctactctcacagggggaaacccccgactaccatcggcgctgaagagcttaacttccgtgttcggcatgggaacgggtgtgacctcttcgctatcgccaccaaaccattgagagtgttctctcaaaactagataacagtaagcatacattcaaattggttaagtcctcgatcgattagtatctgtcagctccatgtgtcgccacacttccacctcagacctatcaacctgatcatctttcagggatcttacttccttgcggaatgggaaatctcatcttgaggggggcttcatgcttagatgctttcagcacttatcccgtccgcacatagctacccagcgatgcccttggcagaacaactggtacaccagcggtgcgtccatcccggtcctctcgtactaaggacagctcctctcaaatttcctgcgcccgcgacggatagggaccgaactgtctcacgacgttctgaacccagctcgcgtaccgctttaatgggcgaacagcccaacccttgggaccgactacagccccaggatgcgatgagccgacatcgaggtgccaaacctccccgtcgatgtggactcttgggggagataagcctgttatccccggggtagcttttatccgttgagcgatggcccttccatgcggaaccaccggatcactaagcccgactttcgtccctgctcgacttgtaggtctcgcagtcaagctcccttgtgcctttacactctgcgaatgatttccaaccattctgagggaacctttgggcgcctccgttaccttttaggaggcgaccgccccagtcaaactgcccacctgacactgtctccccgcccgataagggcggcgggttagaaggtcaatacagccagggtagtatcccaccgatgcctccaccgaagctggcgctccggtttccaaggctcctacctatcctgtacaagctgtaccaacattcaatatcaggctgcagtaaagctccacggggtctttccgtcctgtcgcgggtaacctgcatcttcacaggtactataatttcaccgagtctctcgttgagacagtgcccagatcgttgcgcctttcgtgcgggtcggaacttacccgacaaggaatttcgctaccttaggaccgttatagttacggccgccgtttactggggcttcaattcgcaccttcgcttacgctaagcgctcctcttaaccttccagcaccgggcaggcgtcagcccctatacttcgccttacggcttcgcagagacctgtgtttttgctaaacagtcgcctgggcctattcactgcggctctctcgggcttgcaccctaacagagcaccccttctcccgaagttacggggtcattttgccgagttccttaacgagagttctctcgatcaccttaggattctctcctcgcctacctgtgtcggtttgcggtacgggcacctctcacctcgctagaggcttttcttggcagtgtggaatcaggaacttcgctactataattcgctcgccatcacagctcagccttcacgggaaacggatttgcctatttcccagcctaactgcttggacgcggatatccaataccgcgcttaccctatcctcctgcgtccccccattgctcaaatggtgaggaggtggtacaggaatatcaacctgttatccatcgcctacgcctttcggcctcggcttaggtcccgactaaccctgagcggacgagccttcctcaggaaaccttaggcattcggtggaggggattctcacccctctttcgctactcataccggcattctcacttctaagcgctccacaagtccttccggtcttgcttcacagcccttagaacgctctcctaccactgttcgaagaacagtccgcagcttcggtgatacgtttagccccggtacattttcggcgcagagtcactcgaccagtgagctattacgcactctttaaatggtggctgcttctaagccaacatcctggttgtctaagcaactccacatccttttccacttaacgtatactttgggaccttagctggcggtctgggctgtttccctttcgactacggatcttatcactcgcagtctgactcccaaggataagtcatcggcattcggagtttgactgaattcggtaacccggtaggggcccctagtccaatcagtgctctacctccgagactcttaccttgaggctagccctaaagctatttcggagagaaccagctatctccaggttcgattggcatttcacccctacccacacctcatccccgcacttttcaacgtgcgtgggttcgggcctccattcagtgttacctgaacttcaccctggacatgggtagatcacctggtttcgggtctacgaccacgtactcaattcgccctattcagactcgctttcgctgcggctccgcatcttctgcttaaccttgcacgggatcgtaactcgccggttcattctacaaaaggcacgccatcacccgttaacgggctctgactacttgtaggcacacggtttcaggatctctttcactccccttccggggtgcttttcacctttccctcacggtactggttcactatcggtcactagggagtatttagccttgggagatggtcctcccggattccgacggaatttcacgtgttccgccgtactcaggatccactcaggagagaacgaagttttgactacagggctgttacctcctatggcgggcctttccagacctcttcatctacctcgttcctttgtaactccgtacagagtgtcctacaaccccaagaggcaagcctcttggtttgggctggtcccgtttcgctcgccgctactcagggaatcgcatttgctttctcttcctccgggtacttagatgtttcagttccccgggtctgccatctcatatcctatgtattcagatatggataccactccattacgagtggtgggtttccccattcggaaatctccggatcaaagcttgcttacagctccccgaagcatatcggtgttcgtcccgtccttcatcggctcctagtgccaaggcatccaccgtgcgccctttctaacttaaccgttaaaaagaatcactacgtgatatcttgcattacaattgaatgtgaattacttctgttatctagttttcaaagaacaacatctcgaagaatcgaatgatccttcaaaactaaacaagacagggaacgtactgtttataagacccgaggtctaatattccgttaaaatccttagaaaggaggtgatccagccgcaccttccgatacggctaccttgttacgacttcaccccaatcatctgtcccaccttcggcggctggctccataaaggttacctcaccgacttcgggtgttacaaactctcgtggtgtgacgggcggtgtgtacaaggcccgggaacgtattcaccgcggcatgctgatccgcgattactagcgattccagcttcacgcagtcgagttgcagactgcgatccgaactgagaacagatttgtgggattggcttaacctcgcggtttcgctgccctttgttctgtccattgtagcacgtgtgtagcccaggtcataaggggcatgatgatttgacgtcatccccaccttcctccggtttgtcaccggcagtcaccttagagtgcccaactgaatgctggcaactaagatcaagggttgcgctcgttgcgggacttaacccaacatctcacgacacgagctgacgacaaccatgcaccacctgtcactctgccccgaaggggacgtcctatctctaggattgtcagaggatgtcaagacctggtaaggttcttcgcgttgcttcgaattaaaccacatgctccaccgcttgtgcgggcccccgtcaattcctttgagtttcagtcttgcgaccgtactccccaggcggagtgcttaatgcgttagctgcagcactaaggggcggaaaccccctaacacttagcactcatcgtttacggcgtggactaccagggtatctaatcctgttcgctccccacgctttcgctcctcagcgtcagttacagaccagagagtcgccttcgccactggtgttcctccacatctctacgcatttcaccgctacacgtggaattccactctcctcttctgcactcaagttccccagtttccaatgaccctccccggttgagccgggggctttcacatcagacttaagaaaccgcctgcgagccctttacgcccaataattccggacaacgcttgccacctacgtattaccgcggctgctggcacgtagttagccgtggctttctggttaggtaccgtcaaggtgccgccctatttgaacggcacttgttcttccctaacaacagagctttacgatccgaaaaccttcatcactcacgcggcgttgctccgtcagactttcgtccattgcggaagattccctactgctgcctcccgtaggagtctgggccgtgtctcagtcccagtgtggccgatcaccctctcaggtcggctacgcatcgtcgccttggtgagccgttacctcaccaactagctaatgcgccgcgggtccatctgtaagtggtagccgaagccaccttttatgtctgaaccatgcggttcagacaaccatccggtattagccccggtttcccggagttatcccagtcttacaggcaggttacccacgtgttactcacccgtccgccgctaacatcagggagcaagctcccatctgtccgctcgacttgcatgtattaggcacgccgccagcgttcgtcctgagccaggatcaaactctccgataaagtagtttgactgactacgcacatcgctgtgcgatttatttaaaactttgaattaacaggtacgttttgtcttgtttagttttcaaagatcattttgttcactttctcaagcaactttttaagtatataataagtttctcttaaagtcaacatgtttttttataaatggtggagcctagcgggatcgaaccgctgacctcctgcgtgcaaagcaggcgctctcccagctgagctaaggccccgaagtggtcgggaagacaggattcgaacctgcgaccccatggtcccaaaccatgtgctctaccaagctgagctacttcccgatttttaaaaatattatggcgcgcccgagaggagtcgaacccctaaccttttgatccgtagtcaaacgctctatccaattgagctacgggcgcataataatgaatgccgagggccggacttgaaccggcacggtagtcacctaccgcaggattttaagtcctgtgtgtctgccaattccaccaccccggcgtggatggtatagttggagcggaagacgggattcgaacccgcgacccccaccttggcaaggtggtgttctaccactgaactacttccgcatacaggataactatcctgtataatgcgggtgaagggacttgaacccccacgtcataagacactagatcctaagtctagcgcgtctgccaattccgccacacccgcgttacatggtgagccatgaaggactcgaaccttcgaccctctgattaaaagtcagatgctctaccaactgagctaatggctctttttaaaagacttgtgttattatcttgtccaaaaatggtgccggccagaggacttgaacccccaacctactgattacaagtcagttgctctaccaattgagctaggccggcaaatatggtggaggatgacgggctcgaaccgccgaccctctgcttgtaaggcagatgctctcccagctgagctaatcctccatatattacacttacgtgtaatggcttggcggcgtcctactctcacagggggaaacccccgactaccatcggcgctgaagagcttaacttccgtgttcggcatgggaacgggtgtgacctcttcgctatcgccaccaaaccattgagagtgttctctcaaaactagataacagtaagcatacattcaaattggttaagtcctcgatcgattagtatctgtcagctccatgtgtcgccacacttccacctcagacctatcaacctgatcatctttcagggatcttacttccttgcggaatgggaaatctcatcttgagggggcttcatgcttagatgctttcagcacttatcccgtccgcacatagctacccagcgatgcccttggcagaacaactggtacaccagcggtgcgtccatcccggtcctctcgtactaaggacagctcctctcaaatttcctgcgcccgcgacggatagggaccgaactgtctcacgacgttctgaacccagctcgcgtaccgctttaatgggcgaacagcccaacccttgggaccgactacagccccaggatgcgatgagccgacatcgaggtgccaaacctccccgtcgatgtggactcttgggggagataagcctgttatccccggggtagcttttatccgttgagcgatggcccttccatgcggaaccaccggatcactaagcccgactttcgtccctgctcgacttgtaggtctcgcagtcaagctcccttgtgcctttacactctgcgaatgatttccaaccattctgagggaacctttgggcgcctccgttaccttttaggaggcgaccgccccagtcaaactgcccacctgacactgtctccccgcccgataagggcggcgggttagaaggtcaatacagccagggtagtatcccaccgatgcctccaccgaagctggcgctccggtttccaaggctcctacctatcctgtacaagctgtaccaacattcaatatcaggctgcagtaaagctccacggggtctttccgtcctgtcgcgggtaacctgcatcttcacaggtactataatttcaccgagtctctcgttgagacagtgcccagatcgttgcgcctttcgtgcgggtcggaacttacccgacaaggaatttcgctaccttaggaccgttatagttacggccgccgtttactggggcttcaattcgcaccttcgcttacgctaagcgctcctcttaaccttccagcaccgggcaggcgtcagcccctatacttcgccttacggcttcgcagagacctgtgtttttgctaaacagtcgcctgggcctattcactgcggctctctcgggcttgcaccctaacagagcaccccttctcccgaagttacggggtcattttgccgagttccttaacgagagttctctcgatcaccttaggattctctcctcgcctacctgtgtcggtttgcggtacgggcacctctcacctcgctagaggcttttcttggcagtgtggaatcaggaacttcgctactataattcgctcgccatcacagctcagccttcacgggaaacggatttgcctatttcccagcctaactgcttggacgcggatatccaataccgcgcttaccctatcctcctgcgtcccccattgctcaaatggtgaggaggtggtacaggaatatcaacctgttatccatcgcctacgcctttcggcctcggcttaggtcccgactaaccctgagcggacgagccttcctcaggaaaccttaggcattcggtggaggggattctcacccctctttcgctactcataccggcattctcacttctaagcgctccacaagtccttccggtcttgcttcacagcccttagaacgctctcctaccactgttcgaagaacagtccgcagcttcggtgatacgtttagccccggtacattttcggcgcagagtcactcgaccagtgagctattacgcactctttaaatggtggctgcttctaagccaacatcctggttgtctaagcaactccacatccttttccacttaacgtatactttgggaccttagctggcggtctgggctgtttccctttcgactacggatcttatcactcgcagtctgactcccaaggataagtcatcggcattcggagtttgactgaattcggtaacccggtaggggcccctagtccaatcagtgctctacctccgagactcttaccttgaggctagccctaaagctatttcggagagaaccagctatctccaggttcgattggcatttcacccctacccacacctcatccccgcacttttcaacgtgcgtgggttcgggcctccattcagtgttacctgaacttcaccctggacatgggtagatcacctggtttcgggtctacgaccacgtactcaattcgccctattcagactcgctttcgctgcggctccgcatcttctgcttaaccttgcacgggatcgtaactcgccggttcattctacaaaaggcacgccatcacccgttaacgggctctgactacttgtaggcacacggtttcaggatctctttcactccccttccggggtgcttttcacctttccctcacggtactggttcactatcggtcactagggagtatttagccttgggagatggtcctcccggattccgacggaatttcacgtgttccgccgtactcaggatccactcaggagagaacgaagttttgactacagggctgttacctcctatggcgggcctttccagacctcttcatctacctcgttcctttgtaactccgtacagagtgtcctacaaccccaagaggcaagcctcttggtttgggctggtcccgtttcgctcgccgctactcaggaaatcgcatttgctttctcttcctccgggtacttagatgtttcagttccccgggtctgccttctcatatcctatgtattcagatatggataccactccattacgagtggtgggtttccccattcggaaatctccggatcaaagcttgcttacagctccccgaagcatatcggtgttcgtcccgtccttcatcggctcctagtgccaaggcatccaccgtgcgccctttctaacttaaccgttaaaaagaatcactacgtgatatcttgcattactaattgaatgtgaattacttctgttatctagttttcaaagaacaatatctcgaagaatcgaatgatccttcaaaactaaacaagacagggaacgttctgtttataagacccaaggtcttatattccgttaaaatccttagaaaggaggtgatccagccgcaccttccgatacggctaccttgttacgacttcaccccaatcatctgtcccaccttcggcggctggctcctaaaaggttacctcaccgacttcgggtgttacaaactctcgtggtgtgacgggcggtgtgtacaaggcccgggaacgtattcaccgcggcatgctgatccgcgattactagcgattccagcttcacgcagtcgagttgcagactgcgatccgaactgagaacagatttgtgggattggcttaacctcgcggtttcgctgccctttgttctgtccattgtagcacgtgtgtagcccaggtcataaggggcatgatgatttgacgtcatccccaccttcctccggtttgtcaccggcagtcaccttagagtgcccaactgaatgctggcaactaagatcaagggttgcgctcgttgcgggacttaacccaacatctcacgacacgagctgacgacaaccatgcaccacctgtcactctgcccccgaaggggacgtcctatctctaggattgtcagaggatgtcaagacctggtaaggttcttcgcgttgcttcgaattaaaccacatgctccaccgcttgtgcgggcccccgtcaattcctttgagtttcagtcttgcgaccgtactccccaggcggagtgcttaatgcgttagctgcagcactaaggggcggaaaccccctaacacttagcactcatcgtttacggcgtggactaccagggtatctaatcctgttcgctccccacgctttcgctcctcagcgtcagttacagaccagagagtcgccttcgccactggtgttcctccacatctctacgcatttcaccgctacacgtggaattccactctcctcttctgcactcaagttccccagtttccaatgaccctccccggttgagccgggggctttcacatcagacttaagaaaccgcctgcgagccctttacgcccaataattccggacaacgcttgccacctacgtattaccgcggctgctggcacgtagttagccgtggctttctggttaggtaccgtcaaggtgccgccctatttgaacggcacttgttcttccctaacaacagagctttacgatccgaaaaccttcatcactcacgcggcgttgctccgtcagactttcgtccattgcggaagattccctactgctgcctcccgtaggagtctgggccgtgtctcagtcccagtgtggccgatcaccctctcaggtcggctacgcatcgtcgccttggtgagccgtcacctcaccaactagctaatgcgccgcgggtccatctgtaagtggtagccgaagccaccttttatgtctgaaccatgcggttcagacaaccatccggtattagccccggtttcccggagttatcccagtcttacaggcaggttacccacgtgttactcacccgtccgccgctaacatcagggagcaagctcccatctgtccgctcgacttgcatgtattaggcacgccgccagcgttcgtcctgagccaggatcaaactctccgataaagtagtttgactgactacgcacatcgctgtgcgatttatttaaaactttgaattaacaggtacgttttgtcttgtttagttttcaaagatcattttgtctttcgttcaagcgactttattattatatcttatcaatctcttgaagtcaacaactttttaaatttctttttttcgtcagcgccttgtttagcggcaacgaataataatataccacctcacaaataatagtgcaatagtttttttaaagaaaatcaaaaagttttacgagcggcttgtttctaaaaaagcgccgtactgcgataagcagaaaacggcgccttcccttttattagcgttgtctcatttgagggaataataaaacgtctctgatagacggagcatttgttaacagcatgacaaggcggtcgataccgatacccaatcccccggtcggcggcatgccgtattcaagagcttcaacgaagtcttcatccatcatatgcgcttcatcgtttccttcttctctttcttttaattgcgcttcaaagcgttccctctggtcaatagggtcattcagctccgtaaacgcattagcgtgctcacggccgacgataaacagctcaaaacggtctgtaaagcgagggtcctccggatttttcttagcaagaggagaaatctctacagggtggccgtaaataaatgtaggctgaatgagtgtttcttcaattttttgttcgaagaattcattgatgatatgacccaccgtcatagagtttgtgatctcgataccatgctcttttgcatgaccgcgcgcttcttcaacagtcatctcattccagaaatctacgcctgtcgcttctttgaccgcatctaccatgtggagtcgtttccactcaggtttcagatcaatctgctcttcgccgtactggattgtggtgcttccaagcacttcctgcgcaatatgtgctacgaggttttccgtaagactcataatatctttataatcggcgtacgcttcatacagctcgatcatcgtgaattcagggttatggcgtgtagaaacaccttcgttacggaacacgcggccgatttcgtagactttttccaatccgccgacaatcaggcgtttcaggtgcagttcaatcgcaatacgcatataaagaggcatgtcgagcgcgttatggtgcgtgatgaacgggcgtgcagacgctcctcccggtatgctgtgcatcgtaggtgtttcaacttctaagtatccatggtcatctaagtatcttctcatcgcttggatgattttgctgcgtgtgataaacgtttgtttgctgtcagggtttacgatgagatcgagatagcgctggcggtaacgctgttcaacgtcttttaacccatgatatttatcaggaagaggacgcagtgcttttgtcagcagttcaaaagatgtcgctttgacagaaagctcgcctacgtttgttttgaaaactttcccggtgatgccgataacgtctccgaggtctgaagatttaaagatttcatattgttcttcgccgacactgtcttttcttacgtaaatttgaatttgaccttctaagtcctgcagatgcgcaaagccggctttcccttttccgcgctttgtcatcatacggcctgcaatggtcacttcgatcgctttttcttccagttcttctttagaaagctcctggtaggcgtcaatgatttgttgagattgatgcgttctctcgaaacgttcgccgaaagggtcaatgccgttttctctcagctggttcattttatctcgtctgacttgcagctggtcgttcaattcctcatgattttgctcttcttgactcattggtatcactccgttacattttgatttcacgaaaaagcagaaaaactgccagcggtaagctggcagtgagcagcaatagagggtgtatattaacctacttttgcatcttgaagctcttttgcctctgcttcggcggtaaatgcatctaaaagctgcacaaatttttcacgcgtctcacattggttaatttcattgcgtacattcgcattgcctctgacacctttcagataccaggcagcgtgttttctcatttctctgactgccacattttcgccttttaacttaatcaggcggtctaagtgcagtttgcataccgacattttttcacggactttcggctcgtcttttaactcaccggtttcaaggtactgcaccgtacggtaaatcatccacgggttgccgagtgcggcccggccgatcatgacgccgtcaactcctgtttcctcaagcatgcgtttcgcgtcctgaggcgttttgacatcaccgtttccgatgacgggaatggagacggattgcttcacttctttaatgatatcccagttcgcagtgccttcatacatttgcactcttgtgcggccgtgaagggcaacggcttttccgccggcacgttcaacggcttgggcgtttttcaccgcataaatgtgatcttcatcccaacccattctcatcttcactgtaaccggcttatcaacagcatctactactgcggataccatttcataaatcttatcaggatcgagaagccatttggcgcccgcatcacattttgtaatctttggtacgggacatcccatgttaatatcaataatatcagcagtcgtgttttgatctacaaacttcgccgcttccacaagggtttccttttttcctccaaaaatctgaaggctgagcggtttttcacgttcatcaatgtaaagcatccccattgttcttgcgttgttgtaaaggatcgctttgtcactgaccatttcagcgcataccaatccggctccgaattcctttacagtcaatctgaacgctgagttgcagacaccggccataggggcaagcacaacccggtttttcaattgaatatcaccgattttaaacatttttcccctcctttcatttgtctatttttcaggcggggccaattcgtccgcacttatatttaaaacatctgccgcatcttgaatgatggcatctgacggcaatcggtttccgcgttcaatttcaccgacaatagaaactgatatacctaatgcttttgcaaatccttcttgagtataacctttcagctttctgaatgcacgaattcgcctaccccagatttctgcttccatactcttacaccttcttggtttgtttcagcgcttatcgtgatatgatccgcctgcggacatatttcttttaacggcgcaaggacaaataagcgctcatacattctcggatgcggaacaatcagccgctctgtttcaatattttcacgattatacagcaaaatgtcaaggtctgccgtccgcggtccccagcgaatctctctcgttctgcctaattcagcttcaatggactgtgttacatctagaagttcaaaaggagataacgacgttttcacttcaaccgccatattgagaaactgatcctgatcctcataaccgacgggatctgtttcatatatagaggatatctttgacaccgtcacgccatcatgccgggtgagcatggccactgcctggcgcaaataatgttcacggtcgcccatattggaaccgaggccgatatatgccgtattgttcatgatttctttctcgtcatttctatggctactgatttataatggccgggaatcggcgggtcaggcttaacaacctttaccgtacattgctgcaccggctcaaatttctcaaggacggtgtctgcgatccgttccgcaagggtctcgaccaaattaacgggctcgccctcaacgatgccgcggcagacactgtacaattccgcatagttaatggtataagaaaggtcatccgtttttcccgctttgctcaaatccagttcggcagtcaggtctactttgaagcgctggccgagtttgttttcttcctcgaacacgccgtgatatccgtaaaactccataccttccacatatactttatccataatgcgcgcctcctttgttcagcatagcatccatcatcttagtcattcttgcgatctctttaacatcgtgcaccctcacaatgtcgcagcctttttggacgccaaggcatactgtcgctcccgttccctcggcacgttcttcagggggaaggtcaagcacacggccgatgaacctttttctcgatgtcgccaggagcagcggataccctaacccgctgaacacctccagcttgttcatgacagccagattgtcctcatagtttttcgcaaagccgatccccggatccagaatcatgttttcatctgtgacgccggcttctgcggcaatttttacgctttccatcaagtctgcaagcatatcaggaataagatcgttatagtttctttccatacgattatgcattaagataatcggaactccgtgtgcggcggctactgacgccatgtcagggtcacctttcgcccccagatgtcattaaggatagaggctcccgctttgaccgcttcgtctgccacggacgctttgtacgtatcgattgaaagcggaatgtccagctcgcttgtaatccgttctatgacggggatgactcgtgacatttcctcatcagccgaaacgagtgatgcgccgggccttgtcgattcgccgccgatatctatgatatgcgccccttcttcagccatcttcgccgcatgcagaagcgccctttccgtactgtcgtatttgccgccgtcagagaaggagtctggcgttacatttaatatccccataacgagcgtcttctctttataggacagagcgcctttttttgtatgaatcagtttaggctgttcaattgtttgctgcgccattttgttcctcctcctgtacattcattttgtttatttcctgccgatactgcttacggagcaattgcaccgttttcccgctcattccgggcagcggcacttcctctattttagaaaacgggatgatttcaagcacggagtttgtcaaccatgcttcatccgcttcaagcattgattgaaaacggaatcggccttcggtgacttctgtcccctgccgtttcaattcatcaatgacaaactgtcttgttacaccgtcgagaattcccgtatccaaagatggcgtaaagaccttgtctccttttcgccaaaacacgttggagacaatgccttccgcgacatctccttctccggtcaggaaaatcccttcaagattgggatcattcccgatctcccgtttagcgtacatgttgtttaaatagtgatgggattttaaccggaaagatccttcaggcgtatttctccggacagagagaagcctgccttctttttgaacaggcagagtttccggattgagccggttcacgaaacaaaggacggtcggcttttcataagtctgcgcggcaaatcccttatcgctgacgcctgccgagatgttaagccggacacgcgcgctgccgtcctttatgtcattgagaagcaacagtctccgaagcatatcaagcagctcctgtttgttcacctcgaatgcaatctgcagatcccgaagcgccctgttgagcctggcgacatgcgcatccggcagaaacggccggccgctgtaaagcctgaacgtctcgaacgctccgatcccgtacagataaccatggtcaaaaggagaaagcgccgcttctttctcctctatatattgaccattcaaatatataatcacaccgatacttcctttttgcggtgtgtctctataaagtttctgagcatctctttgccgaaggaggtcatgatggattccggatggaactgaacaccttcaacaggcagctcattatggcggatggccataatttctccttctttggtttgagcggataccgtaaaacaatccggcagcgtgtccgctttgacaataagtgaatggtaccgggtggcgaccagcggattttgcaggccgttaaaaatcgtctgtccgtcatgcataacttctgacgttttgccgtgcatgagccgctctgctctgacgacatcgccgccgaatacttgcgcaatcgactgatgcccgagacatacgccgaaaataggaatactgccggcaaaatgtttgatggcttcgaggctgatccccgcttcatcaggactgcacggcccgggagaaatcattaagaagtccggacccagctcttcaatctgctcaatcgtaatctcgtcattccgtctgacgatcagttcctccccgagctcacccaaatattgaaccaagttgtacgtaaatgaatcataattgtcaatcattaaaatcatctctgctcacctcgtctgattttttgtctcttcttcgctcagctctaacgcctttttcatcgcaaaagcttttttgaacgattccttgtattcatgcttcggaaccgaatcaataaccactcctgctccggactgcataaaagcatgtccgccggctgcatagatcgtccggatcacaatgttaaactgcaaatctccgttgaatccgaaccagcctatagatccagtataaagcccccgtcttgtcggctcaagctcttctataatttccatcgttctcactttgggcgctcccgtgatggtgccccccgggaacaccgcatgaataatgtctgtcgcgtcatatccgtcctgcagctctccctgtacgtttgacacgatatgcatgacgtgggaatatttttcgatcgccataaactcgttaacccgcacggagccgtagcgcgatacgcgcccgaggtcattacgctcaagatcaacaagcatgacgtgttccgcacgttctttttcgttgtgaattaattcatcagccaaagccttgtcttcagcatcgtcttttcctcttgaacgcgtacccgcgatcggtctcgtttcaagcttcttccccttctttgtcaccaatagctccggcgacccgcatatcacttgaaaccccggtgtctcgagataggccatgtaaggagacggattgacgtttcgcaagtgtttatacacctcatacggatgaacggataaagactgagactgcctgatggacaaattaacctggaacacatccccgctcgcgatatattgtttaatttgttctacagcctgtgaaaatccttcctcggtgaacggagcggcgtacgatccgtccccattccgattcagcggtgaaaaaggctcgtccgccgtttggagggaacaccacatgtcctctaagccggacagcttttcttccgcaagatccgcttcttccgcttcagtatgggtaatgagccataacgcctcttcctcatggtcataaacggccacatcatcaaaaacaagaaagtaaatatcaggtgtttccagatcatctaacgacagcatcttaaaattctcaatatatcgggcatagtcgtaactgataaaaccaatcgcaccgccctgaaagtccggaaactcaacgtttgtttccgttccgagcgttccaaaccattcatgaaaggcccgcagcgggtcaccttctttaaacagtgtttctccctcatgcttgatcgttgtaattccgtctttccctctgacggacgcaatcggatctagaccggctatactgaatcttccccctctcgcgctttcgagcagaacatgccgttttctcgatttcgaaaggttttcatatcgctgtaaaaatgcttgtttcgtaaaaggtatttttcttcctgccggtctgcgttgtgccatcatatcaatcctctgcttcgttttactgtagttttattttaaagcaatcacactggtgaaaaaagtgaatttcacttccaaccataaaattcgaaacgttttttggattttcgatacttcaggcacaaaaaaactcccggatacagccgggagccgtgtgtatgtctctattcaaactgataaagcggtgtgcttaagtaacgttctccgttactagggatgatcgcaagcactttcttgcctttcccgagttttttcgcgatttccagtgccgcgtaaatggccgctccggaagaaataccgccgagaatcccttcttcttttgccgttttacgggcatattcaaatgcatcctcgtttttgacgggaatgatttgatcatagatgtccgtattcaatgtttcagggacaaatcccgctccgataccctgaattttatgcggacccggttttccgccggaaagaactggagaatccgccggctctaccgcatagattttgatggatggatatgcttttttcagcacttcgcccgctcccgtgatggttccgccggtaccgattccggccacgaacgcatcaagctggtcgtcaccaaactgttctacgatttctttccccgtcgtttggcggtgaatttccgggtttgccgcattgttgaattgctgaggcacaaagtatccgtgttcctccgcaagttcttccgcctttttaatggcgcccttcattccttctgcgccgggagtcagcacaagctccgctccgtatgcgcgcagcagattgcgtcgttccatactcattgtatcaggcataacgagaatggctctgagacctttagccgctgccaccatcgcaagaccgattcctgtatttccgcttgtcggttcaatgattgtgtcgccggcttttaattttccttctttttcagccgcttcaatcatcgccgctccgatacggtcttttacgctgctgcccggattcatgtattcaagcttcagatatacatctgcactgttttcatccgtcaggcgattcaatttcacaataggagtatttccgattagttcagtaatagaatttgcaatacgcaccatgttggacacctcaatttccgactaaatttattggtattataaatataagttatcaatttcaaaattttttgtcaatcatttagttcttttttccccgtagaaccaagagacccccgcctctttccacagcgttttgactgtcgccttgtcacctaattgatccatcgcgatctggcgtctgatttgactcttcacttcattgtatgagaaagttctcgctttaagcttttctttcagctgaatgacggcatatcctgaagaaactttaatcggttcagcggaccattcatcttctttgagatttttagcttctgtgatatatgcctgcgggatattttcctggttttctgtcacaaagccgaggtctccgccatactgagacgtgtatctgtccgtggaacgctcagcggcgacggcttcaaagctggaaccgcctttcaaatcagcaagcaccctgtccgcctcttccttgtttttgacgacaatgtgcctgattctgtaggaatcatcgaaatggtacagttctttatttttattataaaatgattgcatttccttatccgatatatcgatgtccttcgtcagcagttcttcaagaagaatgttgtagcggatctggtctctccattctttttcggtaatatggctgtcttcataaaatgaattattcaccgctttgattaaaagaaattcacgttccaattcggtgtttgaaactgtgagtttattctttttcgcaagttcttccactacttgtgcattaatcatatcctccagagttgattttccgtactcgtcttccatctttttcatccagtcctgccgtgtgatatgtttatcaccgattgtcgcgatggattcttcagatgaccccgcggcttgggattttgttaacttatacgccactgctacactgcataccaacagcgccgctacaataatcgtcaaaagtgttctcgatttcaaaatctaccccatcccttttacaaaatagaacaacccgctaaagagctagcgggttgtttcgtcacgaagctcttccagttcttcttttgtaaataaatatttctcattacaaaaatggcaaaccgcttcggcttttccgtcttcttctatcatatcttgtatttcttttttgcctagtcctaaaatggccgtttcgaatcgatcttttgaacaagaacagtgaaatttgaccggcattgtttcgagaacgtccggtttttgacccagaacttcttctaagatttcttccggtgtcaggcctttttgaatcaattttgaaatcggttcgatttgagataattgcttttcaattgttgaaatggtttcttcatcagtccccggaagaagctgaatgatgaacccgcccgcagcgagaatcgtgttatcaggatttactagtacacctaccccgacagatgaagggacttgttcagaagaaacaaggtaatacgtgaagtcatcaccgagttcacccgagacaatctctacttgccccgtaaaataatcacgcaagcccaaatcttttacgacactgagtgttccgtcagttccgaccgcccgtctgacatccagtttcccttgttcattgaggtcaaaatgaacgtgcgggtttgatacgtatgctcttacctcaccctttgcgttcgcatctgcgacaatggctccgatcgggccgccgccttctattttgactgtcagcttatcttcacccttaagcatcgctccgagcatcagagacgctgtcatcgtccggccgattgcggctgatgccgtcggccacgtgtcatgccttctttgcgcttcatttaccatatctgtcgttctggctgcataagcccgcactttaccgtcatatgcaattgctttaattaaataatccatcgtttacctcctatatgtgacccacgcgatttcgctcataaatgatttccagcccttttaaagtaagaaacgggtcaacaatatcaatacagtctgattcgtttgcgattaatgacgcaagcccccctgtcgcaatgactttcggttcttgtttggcctgccatttcatccgctttacaatgccttcaacttgtccgacatagccgaaaaggatgccggactgcatggcgcttaccgtgtttttgccgatgatattatccggtcgggcgatttcaattctcggaagcttggccgcgcgtgagtacagcgcttccgttgaaattgtaatgccgggagcaatcgcaccgcccatgtattgtttgttttcatcaatgtagcaatacgtcgtcgccgttccgaaatcaacaacaattaaggggccgccatactgctggatcgctgcaacggcattgacgatcctgtcagctcccacttctttcggattgtcatattttatatttaaacctgttttcattcccgggccgacaacctgcggctcgatgtgaaagtattttgtgcacattctttctaaagagaacataatcggcggcactacggatgagatgataatcccttcaatctgttcaaacatcagtccggaatgttcaaataaggagcggagcagcatgccgaattcgtcttctgttttgtgcctgctcgtttctatgcgccaatgatattctaattccccatcatgatatacaccaatcacggtgttggtgttccccacatctataaccagtaacaacctctatcaccacttttgaatagtttctaatcataacattttcaacattctacaataccatacacgatctgcggctcttttgtaaacaaaacggaaccagtaaaaaaaccgccggtatacgccggcggttttcatatcagaaagcgaactattctttcggctcgtctttcttttcgtcttctgttttagacaggatgtttactttcacatcgtctttttgaagatggtcatctgagaaattgcgctcagggagttttccgtgatccacgagatgcttgatttgttccgcatctaatgtttccacatcaagcaatgtctgagcaatcaattcaagcttatcgcgattttcagtcaggatggttttcgcacgctcataacattctttaatgatgcgctgaatttcctgatcaatttcgtaagcgatctgatcactgtagttttgctcgttgttgaaatcccggcccaggaatacttgaccgccttgagattgaccgaactgaagcggtccgagtttttctgacataccgaactctgtcaccattcttctggcaatgttcgttgcccgctggaagtcattgtgagcccccgtgctgacttcgccgaagataatttcctcggcaacacgtccgcccagaagaccgacaattttatcgagaagttcaggttttgtctggaagtaacggtcttctctcggaagcatgactgcgtatccgcctgcctgccccctcggaacaatcgttactttatgaaccatatcggcttcatccagcacaagtccgataacggtgtgaccgccctcgtggtacgccacgatattgcgttcttttttcgagatgacgcggctcttcttcgcaggacccgcaatgacacggtccgttgcttcatcaatgtcgcgcatatcaattttcttcttgttttgacgggcagcaacgagtgccgcttcgttaagaaggttttctaaatctgcgcctgagaaaccgggtgttcttgaagcgattgcttttaagttcaccgtctcatcaagcggtttgtttctcgcatgcacctgcaatacggcttcacggccgatgacatccggacggtctaccgtaatctgacggtcaaaacgtcccggacggagcaatgcagggtcaagaatgtccgcacggtttgtcgcagcgataataatgattccttcattcgcactgaaaccgtccatctcaacaagcagctggttcagcgtctgttcgcgttcatcatgcccgccgccaagaccggcgccgcgctgacgtcctaccgcgtcgatctcatcaatgaagatcaggcaaggcgcattctttttcgcattttcgaataaatcacgcacacgggaagcaccgacaccgacaaacatttcaacgaagtcagatccgctgatgctgaagaaaggaacgccagcttcaccggctgaggctctcgcaagcaatgtcttaccggttcccggaggtccgacaagcagcacgcctttagggatcctggcgccaagctcggcgaatttgcggggatctttcagaaactcaacaacctcaacgagctcctgcttctcctcatccgcgccggctacatctttaaacttcacgcgtttcttttcttccgtatacagcttcgctttgctctttccgaagttcatgacacggctgccgccgccctgagcctgattgagcaggaagaaaaacagaataaagatgatgacaaacggaatgatcgtcgttaagaacgtcacccacccgcttgtttcctgtgcgggatcaacttttacgtccgtctttttaattgcgtcaaatatctggtctgctccttttccttcaggaacatgtgttaaaaagtactggtctttgtcgtattttttcagctgtccttttacctcataaacacctctgacaggctgaaccgatacgctatcaactttcccttcatcgaggttcttgataaacgtactgtacgacatattttctgttttcgggtttgaggtctggaagtaactcacaaccccgattactactaataaaataagtaaataaaaaatggtattacggaagacccgattcattccttacctcctcccacagtaagcacaactatgttcaatagtaccatagaaaatcattccaatacaaccgataaccatctcggaagcaggcagccgatcagctttcataaatcgccggttttaatactccgatgtaaggcagattgcgatagcgctcggcataatcaagtccgtaacccacaacaaacgcgtcaggaacttcaaagcctacgaagtctgctttaatgtccgcttttcttccgcttggtttatccaacagggtaacaatcttaattgatttcgctttacgatatcggaagagttctacgagatagctcaaggttaacccactgtcgataatatcttcaatgattaagatgtcccggccttctacagatgtatccaaatctttgatgattttgacttctccggaagaaaccgtggaatttccgtagcttgatacatccatgaagtccatttccaaatatgtatcaatatgctttataagatcagccataaaaggaagcgctccctttaacacaccgattgccaacggaaacgtgtcgctgtactcgcttgttaattgttctccaagctgttttactttctgctggatctcatcttctgagatcagcactttttcgatatcctgtttcatgttaatgcttgccccctacacttttcatgctgtctatattgtaatacaatgcggtcactgtttgaaatcacaagatcgtcaaagatggattttttcaagccaggcagccagataatttcaccgctcgcatccgttacaatcggccattcgtcccgatcccgcagaggcagtttatgatcaataaatatatcttttacctttttcgagccattcatccctttaagtttaatccggtcgccgatttttctcgtccggattgttaaaggaaattgcaccttatttctgcttgtcataaaaacagcattcccatttttgatatgagggtcagcctgatcggccacctctatcataaagccgttggggagaacagcagtctcgccttccgctccttgcagctgcagctcaaagggaaccttttcacattgccattgttcaaatgtaaacaaacatgtctgatatgatttgaccaccttcagccctttcggaaaatcaagcactcccgaggcgcttccattttccgcccattccagaaactgctgtatgtggcgggcggaaaacgacgatggaacgttttcataaagatagtttaatattagttgaactcctcttctttgtaaaggtatcggaagggcaagcaattgagaggaatcgacttcaaccgatgtgtcagacttgcttgtaataaccttattcattcgttctttcgttaatgactgcaagtattgttcgtcttctgtcagtgcttcactcaccttttgaaacattttatgaacgtcaggtgattcttgttttaaaaaaggaagcacggtctttctgaatctgtttcttgtataatcgtcttttgcattgctctcatccgttctgtagctgagcccttcttgacggcagtattctaggatttcatccttttccgcatagaggaaaggcctgatcagccagccggatgcaaattcgcggacgggctgcattcccgcgagccctgcgccgagcgtacctttcgcaagcctcatgagcattgtctcaacctggtcatcgccgtgatgagccagcgccaaaaacttcgcttggtgttttgtcatcagatcttcgaaaaactgatatctgcaatcacgcgcggcagcctgcttgttcagcttattcttctttgcgtatgcagaaacatcaatctgtaccgtttcgcagaggatgtgttccgcttcgcaatatgactgcacaaacttcatatcttcttcagattcaggacccctgaactgatggtcgacatgcgccgctatgataacggaagaatgcccgaagtgcttattcagcatactgagaagcgccattgaatcagggcctccggagaccccggcaataatcgtttctccctccgcctgaagatgatatgttttgaaaaaatcttccacgcttttcacaatgtcccctcacaatgagcaggtttttttaaagatatacatatcctatcactttcattccctccaagcaaagaagaagcatgagcgcaggcgtccggccggcattagatgagaaaaaagacgatgtaagcgaaataaagggcgagaacgctgattaaaataagcgttgtttcaaacaaaccattgtgctttgcgggtttttgtttaggtttataccgcgtttgagatacagtgccctgccgcggttttgattgcggcggcttaggcttggcggcggctttccttttactcccggcgctctgccccgccgtcaggatgtcatgcttcatggcttccgcagacggatattggccgtttaaagcagaaaacagaaccttcttatacttattcagaaacgggtggccttcaatgatagaacgaagctgttctttcggctgtcctgactttttgcactctttcttctggacacagtggatcatgatcattgcgacagcaaacaggtcataggatggttctgcttttcttgttccatacccccaatagccctgtcgtaaaactccgtatactctttaatcgcgcggccttgttttgtcgttccccctacatcaatgcagcggatggcagccggcggtccggttacaataagattttccggtttgaggtcgccaaaaacccatccctgctgatgaaggactgacaagctggaaagaagctgcaccatcagcaccggaatccactccgctcccttactgctgatatattgcggaagaagcggcccttctatgtactccatcacgtaaaaagagacatttttattcagctgcggaataaacgcatcgtccgcatcaaaaaaagaaggccccatcgtttgcgaccgggcctttgaaaaggattttaagacattcacttcagaggtaacagacatgctgtcgctgcttattttcaaagcgacctgtccgcctgatgcttctgccagatatacaataccgttagccccttttccaagctgtttgagcaatctgtaggatttgccgttccatttgccctgaattgccgtccccggtgccagactacatgccaaactcgttaaagcgtcgttcatcatctgccaacatgctccttcttgagcggattctctcaaactgctgcgtcgcttcccggatagcggggcccgtaggggtgataccgccggtcgacagcttcgcaaagagcgcagaaagggattcaagcttcggcgtccaattcagcacaagctcaacttcctggcttttcccgggaaatatacacatggcaaattcattttgtccggcccgggaatttaaactgatggaaagatcaatcagcgcttctttcaccgtcggcagtttcggcgccatactcgcactcgtatcaaccagcacaagcacctgcagatgaactgtttctccgagttcatcaaccacttccatcacttcgccgcgtttttccggagaaagctcttccatttcaacgtttttccctaagatttgtttaagctcttgattgacgacaccttgcagcgtctgggtcattgcttttttcgtcaccatttgaaccgtctgagacaattgtgacgcatatacaacttgatggacgccgccaccggccatggcgatgccttcaacttccttcattgcctcttggtcaatcgcgttttcttccataatccctataacattcaccgtaatcccctgctccttggcgaaagccgccattgcaatcgggtcttcaccatgattggagcagccatctgtaatcagcagaacttgatttaaatgtcccttattcacatacattcctcccggtgatacgattagtcccatcttcgccagaaggaaagtgatttatacgaaaggattaagaaatctcctttttattttggaataccgccggcaccggtatggaagcccatttcggcgtgttgtgatcaatccggacaacaaccaccgtcatatcgtcttcgatttggccggaacgcgttctgatgacctcttccattaatatatcagcgatttcctgcggatcttcggttttcagccctttcattttccgtttcatccacaggtcgtggttttcaacgtgcttcggtccttcaaaaataccgtcactcatcatgacgagcagatctcccgcttttaactgttcacttacaacctccacatcaaattcattgatgataccgatcggcagattgctggcctgcactttcatgacttgatctccccgcttgataaaactcggcgttgaaccgacctttaagaatttgcagcttgcatcctgaagatcaatgatagaaagatcgagagttgagtagatttcgtctgtcgtccgtaaagacagaatactgttgatcgttttgatcgctattttttcatcaatacctgattcgagaattttttcgagcagcttaatcgtttcgttgctctcataatgagccctcgccccattgcccatgccgtcactgattgcggccgcatattttctcgcccccagttccatcatgctgtagctgtcgccggagacaaggccgccgccttttgccgcatgagccgcgcctgtcgatacccggtacgatttggtcgaaccgaacgcaacatggctgtagccattcggatgagccgagtgctgttcgcttttgacaagtatctgctcctcaagaatgtcagacagcatcggggcgataattttctcactctcgccgtgtcctccgctgaacgggattgtcatttcgatatcaatattgccctgctccaagctgtatatctcgacatgctgaatctcgattccgaaatgctgaagcgcctctatcatttgttcttcctgaataaaatgctgctccctctcccgttttatttcccgagaaaagtccgccataacctcagaaacccccaacagctgctcggcaacaagcctcctgctgtcctgaacttttctcttcagtgtcagatgggcgtgatggtgggcaagttcgtcctcaatcagctcttccacctgtctggatttggaacagtgctgttgaaactcttttttcaatctgcggtttgaggcatactgcttttcttctgtttcatgcataacttgtttcattaagtcatatgttttatcaaagttttgaacccagcatttgctttttttatagcaggattggcaggaatgctcggtgattttgcttaaaaagagatccacttccccttcttccgcctgctcatcggaagacgtctgatgaaaggtggcgaagctctccgacaaggcatgaaacacattggagaactggtctactttctgggcggtgacatctctgattttcctcgcgtactgctgctgctcctgactgtgctcagcagtgcccggtatgtatcgcgccacctttttcgtaatcgattggggcgtaatcaaaaacaatacaacggcaatcaaagattcataaagagtggtcattaatccggcagacccttcaccatataatgaaatcagcagtgagccgatcaccaatccgactgcggcgccggctttctttccttctttcagcagcccgccaagaagcccggaaaacgcaagcagactcatttgatagagattcccgatattcgcaagcccgaggatcagtccggtcacaacaccgaccgtacagccgatgcttgccccgccgacaaaggaaaaactcagcacgacatagcgggccaggatatgttcagcctgcattccctgaaatgaaacaccggcaagcccggttaaaacggatgcgatcaagatcataaaacagatgatttcttctatttttaacgattgcttcacttttttgatcgtgaaaatcggcaggctttgtaaaaagatcagcgtcaaaataaaggccaggcccgcctcgacaacagccatcacataatcataggtggtaaaagcgccgctttcaaaataaacaaatccgattctcgcggcagccatagagaaaaacaccacgatcggcagcatcttcacccggtcctgcacgatatatgtaccgatttttgaaaatagagtgaagacggccaaagctgtgagaatcaataaagagtgtttcggcgaaatggttaaagcgcccgcaagtaaagacagacaagcatagaaggctttatctcttctgatcaaaagcatcgctccgaaaaacggcagtgcaaatggaagaacctcagataatatgaaagcccgtccaagtaaaaaaccgatcacgacataaatgaaacccttatagaaaaaaagtgaatgcgcttgatggactgtaagctttgccgccttttcaaaaaacgattgcagtttttccagagcttgtcccgccatcggcccgttcactcttctttccgctttttccattgctctcatcccccacctgttttattcgttgcttgtcattataaatgaaagcccagataggattttgtcaaaagaaggtaacaattccaaagaactcttcgacgctttctcccttgttcccctttccttttgtatttcctccgacatttctcaaaaagttgtctaaatatgaaaaaatcggcttctgcaacagaagccgattcgcttgatgacccgtacgggattcgaacccgtgttaccgccgtgaaagggcggtgtcttaaccgcttgaccaacgggccagatatatatggtagcggcggaggggatcgaacccccgacctcacgggtatgaaccgtacgctctagccagctgagctacaccgccatataggtgcttataagcacaagttatataatacaaaggtttcttcattccgtcaacagaaactttaaagttttaattttctgactacatgcgcgtatacaaaaaaagcacccgctgggatagacggatgctccatgtatttatagaaagcagcaagttatcctcttcttgctccgcgccctccacgttttgattccgtgtttcgttttaaagatgataagcggtcttcgctatctttaagaaacttgttcattttctgttcaaaagattctttcggacggaaatcatttctaggtctggcttgcggacggtctttagcttttttaattgataaaccaattttcccgtctttttcaacgttgatgactttcacttcaacttgatcgccgacttttaaatgctcgttaatgtcttttacataattatcggctacctcactgatatgaacgagaccggttgagcctccaggcaattcaacaaatgctccgaaatttgtaatacctgttattttcccttgcaacttgctgccaacttcaatcgacataaaaaaagtgctcctccttaggcttataaaaagatcgtttgtttaattatacctaaataaaaatttaagtgtcaacaaggctacttgctcttcttttctacattaaagagaatctcaccatttcctgacataaacaagtctcttctggcaagctctgtgacgtaatcctcatcctttaatttggaaatttcatcttttaaatcagcctgtttcgcattcaattctttaacttgtttttccagctgagcctttttttcttcgtttgcgctaagggaagaggtctgtgaccacagagaacccgctaagacaatagccgtcaacaacacaagggcgccgaatacgatcaaccgtctgaaaagccctttccgccttcttttcataagctgggattgccgttcaacctgctctttatagtcgttttgaatttcagttattgtacgttccctagatagattcaaaccagacggtcctcctttcaccttttcaaaatacgtatcatggtcgatctgattgttatgattagtttcttgctcttttgtaaaaatcctgcacttttttgaaaatatcgtttgaaagtaagacgccacttttcaggaagaagtttcaataattgtttcaacaggaaaaacagcggatacagcaaaaacgctacgatcttaaaaagacacttcgcaaaaaaggcactcacccgataggagtataaagaaataaccgtgatcagcccgatgagcagcttaaagagcagaagcaccggacggaacagcacgtgctgaatgagcttttttgcgaattggtaaagagacaccgcaagatgaatggcaaatttcagtatttttatatacattcgtttaaacaggctttggtacgtcgcaatacccagtaagacagccaagaaaatgtataccctgagttccccttcattcacgttgagcagcacatagaaaaacagcagaccttgtacaatccaaaagagaatgtcatgaatgaataacagccatctggccgttttggcgcggctgacaaacagcctgtatgtatcaagcgacgctccgagccaggcgcccataccggtcattgccagcatcgtataaaattgggtcgtcagcgtcatttaaacaacttgctaaaaaaccctttagctttatccccttgctgctcgtctaaatatacaaggtcaaacaccctgccttttatagatacaatccctttttccacatcaaggtttttcatctgcagattctcgcctctgacggaaagcattcccataaccgtttccagcaaaaactcttcgttatcaaaactttccacatgcttgacgcccgaaatgtctaaatgctttctccctttcatcgttacatcatgctgttccggaacagaagaagaacctttttgctcataatatgaattcatctattcagcccccatatcctcgatacttttagcattattactgcattgtatgaggcgggagccttgtttagaacaagcctattcgccgagtttttcttctttgacgattgtatacatgcccgcggcttcttcttttttcgttgtttctttcaattcatttaccttcacggtgacaagcttctgcccgaagcggaccttcagttcatcaccggcttttacgtctgagctggctttcgcctgattcccgttaacggtgattctcccttgatcggcgacctctttcgccaatgtgcgtcgcttaattaatctggatacttttaaaaatttatcaagtctcatatcagaatctcctctccatttcttttgcttcatcccacaatttgtccatttcctcaagtgacattgcggtcaattcaaggccctttgctgccgcttctttctcaatataagcaaagcgtctgcggaatttgtcatttgtcatggcgagcgcttcctcaggctcaattttatagtatcggccgatattgaccaatgcaaataaaacatcgccgaattcagcttttaagctgatttcatctgctgattcggcggaagcctctgcagaaaattccttcagctcttcatttactttatcccatatgtcctgaacgttatcccagtcaaagccggtttttgcggcttttttctgaagcttggcggctttcgcaagagaaggcagtgttttcggcacggcatccagcaatgaagaggatgttgtttgcttttccgcctttttgatttcttcccagttggcgacgacatcatgttcatcctgaaccttaacatccttaaacacatgcgggtgccgtctgaccatcttcgcactgatgtctctgatgacatcatcaattgagaaatacccctcgtcttctccgatctgggcgtgcagcataacctgaagcatgacgtccccgagttcttctatcatgtgatccgtgtcctcttcgtcaatggcctcaagcagttcgtagcattcctcaatcatatatttctttaatgactggtgtgtctgcttttgatcccacggacagccgttcggcccgcgaagctcgcgaataatacttcggaatgcagaaaattcctggtaaaggagttcttcttttttaatcggcggaacatacacgcttgttaagttatttatttctacattgcggtcaagttcaaacaaaggcaccttgatcatcttttctcccttgctcccggctgctgtaacgatgaccacttcatagtcgtcaggcaatttctccatgagcgtcagcttcacctcagaggccgtcatttggtcataaacctggcagatgatcaggtgatgccggagttcgagctcatccggcgtcattgtttgcgcatccgtaaattgaaacccttcaatcggatcaattcgcaacgcattaaaagtggcatccagaaagctttgccctccagcggtatgaacatctatctgttgttcttcccggcgttcaaataacagctgaacggttttctcagcgacaaacggatgcccgggtacagcgtagacgacatcctcttgcttcgctttttcaaacagaatgtccgcgatctcttcatagaccgcttcaaactgatcatgtttttcataaatatcatcaaaataccggatgtccgcttccgtctcttgctctaattccgaaatcaaagggtggtctttcgttcttatatataaatgcttcgcctgagtcagcagcttatgtacgcccactgtcaactgatccatgtctccggcgccgaggccgacgaccgtaatattacctgccatgtttttctctcctctttttcaatttgcttaaagcactgccgaaaggaagaccgctcagctcttcgtccgtgaaaatcttcattcttatcatacaataaataaacaatagccctccgatgattgacgcagacagactctcacatacagctccgcccctgctgacaggaacaaataactgccaaagcttcatgtatacgaccaaaaagaagaccatcagcagactgcaccagcacagacgggcaatcacgcctccgatattcgtcagccatcccttcgaccaaattctccggagattcaggcacgcaactgcggcaaatgccaagacggtcgccagtgccgctcctgtaataccccagccggggaccagccaaacattcagcacccatttcagcgcccctcccgccaaaacggatacggcggggaaaacggtatgtcccgctccttgcagaattgcggctgccgtaagcgcaatcgaggcaaaaaagatagataagctgaatatttgtaaggtcggcgtcccctcactgttttggaaaagcatgatattcaccggttctaaaatgcaaaaaagcccggctgatgcaccgatccctaccgcaaggcagagcttgacggcagatgacgctttctcttttatgataaacggcttgttctcatgcaccgcttttgaaattgaaggaaccaaggacgcggcgatactgacggcaaacacggttcccagctgaaggagcggctgtccgcggtcatatatgcctttcagctgtttcgcggcatggctctccgtcccgtctgaaagcagtgaatataagtttaaggcgtctacaagctgaatcaaaagcatgagtacactgctgatacagatggtgactgaataaagcagcagcttttttacaatgacggccgtttcgatatgtccgccgtctttctttgtttcttcccgcttataccagaaaacagccaatacacaaagggccgcaaagctcccggcaattgatcccgaggccgcccccgcacccgccgcgtataatgaacgcccgcttttcaaaagccagaaggataaaccgagaagcaccgccacccgaagaagctgttccgtaatctgggataaggctgacggcatcatatcatgcacgccttggaaatacccccggaaaaccgccgtaaacggaaacagtatgaaagcgaacgccgcgacccttatcagcatcacaaggcgggcatcacccataaaaccggccaacggcgccgcgccggcatacatgagcgcaaacagaacaagtccggccgccgtgacataaagggcggaaattttcattattttttgtttatgatcgctataatcgttcattaattttgagatgatcaccggaaaaccggatgttgacagcatgaccgcgatccctaaaaacggatacacctgctgataaatgtaaaatccgacgtcaccgacaatattctgaaaaggaaccctgtacacggcgcttaatatcttcgtcacgatgcccgcaacgacgagcacaaaagcacctttccatgccgattgccgcttggcgccaactgaatcgttcatccaaaagctccttccagccgctagaaaattacgtctataaaacgagcttattatatcacaatcctaacggccgaaccgatagagagcacatatgaatatgaaaaagaacagcacttgtataagagctgttctttccccgttttcttatttcaataatggtaataagacctactgctccatttgtctcgccaaaaaactggctgccgtttctaccgctttatgttctacttctccaagcgcctgttccttggaaaagatgaccacggcaccgataggatcgccatttgccacgatcggagcgattgtataggagctcatatcttcatcaatgtcattcacaagctgcgcggacttcacgtcgttttctaccactgagctgcgctgatccatcgttttttcgagcaaatcgctgatggctttattcagaaattcttttttcgaactgcccgaaacggcaatatacgcgtcacggtcgcaaatcaagacggaatggccgagactgtcatacaatgcatctgcatattctttcgcaaaatcgccaagctcactgataggagaatattttttcaatataacttctccgtcgcggtcaacgaatatttcaagcgggtctccttccctgattcgcagtgttctccgaatttctttaggaatgacgacccgtcctagatcatcaatacgacgtacgatacctgtagctttcatctctctggtgcctctctttcatgtgatgatatttaagggaaagtactaaagctctttactttatgtagcttccgccactcgcttgaaattagtatccgtcacatcaaatgtaatatacaccagagagtaacaatttttatgaagacgcgattgtttctttcttcacattctgaaggcctttcagcatgccgagcacggtctccagccactcttccgttttgcggcctttcgtctgtactgagattttcagctttttcccttccattcccagtccgatctgccggccgtatttattgccgagttcgaataatttctggccgtcaatctgtgcgctggcctcttcagaaatggtaaatctgatcgcgtctttatcctgcttgatgagttcgacgcgttcatattttccgtataccttcatctcagcaaccgtaaacagccattcaacttctttaggatagctgccgaacctgtcgatgatttcatcttggagctcatttttctcctcaattgtggcgattgatctgaagcgtttatacatgtcgattttttgcttgccgtcttgtatatagttttcaggaatatacgcgtcaagctcgatatcgatttctgtctcaaactgttcgcttttcggaatatcgcctttccgctcttcaatcgcttccttgagcatttgcgagtacaggtcaaaaccgactgagtcgataaagccgtgctgctgggcgccgagaaggttccccgctcccctgatcgtcaagtcacgcatggcgattttaaagcctgatcccagctcggtaaattctttaatcgcctgcagccgtttttccgccacctcagtaagcactttgtctctgcggtacgtaaaataagcgtaagcgacgcggttggaacggccgacccgtcctctcagctgatacagctgagacagccccattttgtctccgtcgaacacaatcaaggtattgacatttggtatatctacgcctgtctcaataatagtcgtgctgacaaggacgtctgattccccttccagaaaattgagcatgacgctttccaattcattttcggtcatttttccgtgggcatatgccacttttgcatcgggaacaagcatggaaatttcatcagccttccgctcgatgtcatccacgcggttgtacaggaaatatacctgtcctccgcgcgccagttctctttcgatagcttctcgtacaagcgcgccgttgtattccacgacatatgtctgaacagggaaacggttttccggcggcgtttcaataacggataaatcccgcacaccgagcatggacatatgaagcgtacgcggaatcggcgtcgctgtaagagtcagtacatcgacattggctttgatctgtttgattttttccttatgcgttacgccgaagcgctgctcttcatcaatgatgagcaagccgagatctttatagacgacgtctttagataagagcctgtgggttccgattacgatgtctaccgttccgtttttcagtcctttaatcgtttcattggattcttttctcgttctgaatcggctgagaagaccgatgttaatcggatagtcctgaaaacgctccgtaatggtttcataatgctgctgcgcgagtattgtcgtcggcacaagaagcgcgacctgctttccgtctgcgatcgctttaaaggccgctcggatggctacctccgtcttcccgtaacccacatcgccgcaaagcaaacggtccatcgggcgttctctttccatatcctttttaatctcctgaatggaacggagctggtcctctgtttcctggtaagggaaagcagattcgaactgccgctgcatttcatgatcgggcgagaacgcatagcctttgcttgcttcccgttccgcataaagcttaatcagatcatcggcaatatcctgaacggagttttcaacttttttcttcacccgtttccattcactgccgcccagtttataaagcttcggttcttttccttcagagccgacatacttctgcacctgatcgatttgttctacagggacatacagcttatcgctgccctgataatgaatgttgaggtaatctttatgaatgcctttgatttccagtgtttcgatccccaagtacttaccgatcccgtggttgacgtggacgacatagtcaccgacctgaagctcggaatagcttttgatccgttcggcatttgtcagcttctgctttctcggctttttcttgattcggtttttgaacagctcttcctccgtaatgacggccagcttcatcagcggcagttcaaaaccggattgcagctcgccttccatgacatagacctgtccttgcacaagcgctttggagctgtccgttttcgcggcttcaatttcgtaatcagccagcacggatgccaatctgtcggttctgtccttatttgcgcctaaaaagacgacggtgaagtttgatttcttaaagcgctccatttcacctgagaggacattcatctgcccgtgaaaactctgcatctgccggcttgtcacattcacgatattctgagggcttgtatgctggacatgacgcaaaaataatgaataataaatagccgggcgccgcttttcgctcataagctcctgaaagctgaaggataaatgaatgtcatgcagaattttcccttcctcgagcagacttgtcgtaaattcggcctcttctttttgcagctgatcctccatttcatgaatgcggctgacctcgtctaacaataacaacgtgtctgccggtgtataatctagcaaactagcaggtttttcgtaaaagtacgagagatacttcacaagttcctgatcagtctgtcccgttgataaccgttctttatcatgtgagatattgatatgaagcatttccttttgtttgtcctgcttcagctttttcagactgtcggcaagccctttatcgagcctttccattgcccgggctttttcttccgccctgatgatcaattccttcgccggtccgatcgccacatgtttgagcgtctcgattgatctctggtcatcagaattgaagcttctgatggaatcgacctccgtatcaaacagttcaattcgcaccggatgctccgacgtcagcggataaatgtcgataattccgccgcgaatactgaattcaccgggtgcagaaaccatatcggaacgctcataccccacctctacaaggcgcgcggacagctgatccggttctatatcgtctccgagtgaaatgacgagctggctgcttttccacagctccttcggcggaagcattcttctcactgccgcaacgggcgccacaacgaccggcgcttctccgtttgttaatctattaatgacatcaagccgctgagcgcgcagttcaggactcgctaccgcaatttctgaagaaatcaattcattcacggggtataaaaaaacagattgatccccgagaagcgccgtcagatcttccgtcactttttgggcctgatataaattatgggtgataaagaaaatcggccttttcgtttcctgtgcaagggcggaggtaaaaacagaacgcgcggaacctgacagacccgcaagcagctgttccttcagcccctcatgtaaaccgttgacaatggatttaaaatcatcgctttctttaataaaggtttgaatgttgtccatatgggccctcctctctattttctgcaagaacagaaaaacgctttggtctagaatctacaccaaagcttcttattgaataaatgtgttgtgttcatggtagtgcggattgcgttccagcgcctcttggcagtcttcacaaattgtaagaacatggacatctccattgtctttatatgaaatcatatcgtttctttcctcatttgttaagtgctgaaatccaagtgactgtgtcggcaccgttgaatattccaggctccctaccttaaagccgcagtggcggcagaaataatgcaaagccatacgttggacctcctgatgtgaaaaaatcatttttccctagtatggtctcccattatttatcttatacatttgcattaaattcgttcatgacttctaaaaatggtttcgttaaggaagcttcgcaggcttttacggtttttgagacggcatcattgatatgcggcgcttcttccttcgtaaaagctcccagtacatagtcaacgactttcattccgttaacggggcggccgattccgattctgacccggtcaaattcaggggttccgaggtgctgtataagcgatttaattccgttatgtccccctgcgctccccttcgtccgaagcctgatttttcccgtcggaagatcaaggtcatcgtatatgactttcagatcttcatgatcggcatcataataatccagcagcggccgcaaacattctcctgataaattcatatatgtaagcggtttaacaagtagaactttttttccggaaacaaaccccattccgtaaagtccgttgaatttcgttttattcagttcaatattccattctttagaaagctcgtcaatggccataaagccgacattatgcctcgtgttctcataggtttttcccgggttaccgagaccggcaatcacaagcatcgtaaatcctccctcaacatcgctgtaattcttctcattctagcacaaaagacgtaacctcgggcgggttacgtcttaaagcgcttattgattttctccttcgggctcttcctcaggagacggttctgcatcttcttcgaatgcttcctgcttaggaggaaggatggaagccacgacttcttccgggtcgtttgtaaatgtataattgccgtcagcagtcagatctgcgatggtcagcacatcattcatttcaagcccggaaatatcaacattaattgtctgagggatgtccttcggcttagccttgatcgaaagctcatgcagcggctgctggataacgcctccgtctttgactcctttcgcctctcccgtcagctgaatcggcacctcggcctcgagctcctcactcatattcacgacttgaaaatcggcgtgcgtcaattcgtttttgagcgggtctgtctgaagatcagtcaccataaccgattgctgatttccgttgacatcaattgtgataatcgtgttttttccttcgtcccgcaatgttttaagcaattcgacactgtctaaagagacaggcgtattcgttatttctttaccgtatataatccctggaacatgtcctgaatgacggattttccgaagcgtcgaacgtttaaaatctgttctttcatttgcttttaaagttgccatattcagcaccatcctaattatcgttttatcgtcctattagaacaatacccacaataactgggatttaaaccttaaagtttcggtttagctgaataaatagctgacagattgtttctcgtgaacgcggataatcgcttcagccagaagcggtccgacagaaagctgcttaaagcggtcgatttttttctcatcaggaagcttaatgctgttcgttacgacaagctccttgattttagagttattgatccgctcaacggcagggcctgacaatacagggtgcgtacagcatgcatacacttctgcagctccgttttcaaccagcgcgttagcggcaagtgtgattgtgccggccgtatcaataatatcatcgatcagaatcgctgtttttccttccacgttaccgacgatgttcatcacttctacctcattcggtctaggacggcgtttgtcgataatcgcgatcggcgctttcagacggtccgcaagtttgcgggcgcgcgtcacaccgccgtggtcaggagaaacaataacgatatctttcaagtctttaccttcaaagtaatggcctaaaatcggaacacccattaagtggtcaatcggaatatcaaagaaaccttgaatttgcggcgcgtgtaaatcaagcgcaatcacgcgtgtcgcacccgctgtttcaagcaggtttgcaaaaagttttgccgtaatcggttcacgtgatcttgcttttctgtcctggcgcgcataaccgtagtacggaatcacaatgttgattgttttcgcggaagcgcgctttagagcgtcaaccataatcagcaattccataatgtgctcattaaccggcgcacttgtagactgaatgatatagcaatcacagccgcgaatactttcttctatgttgatctggacctctccgtcactgaatcttgtaacagagcactttcctaattgaacccctacattatccgcgatttcttttgcaagttctggatttgaattcaaagaaaaaatctttaaattcttatctccgtattcgttagacatggtaaacctccgattttaggattattttttatgaatatttttcacataatcttctttatttacttgtcttgctctggcaatggcaagcgcttcgcccggcacatcttcagttacggttgaacccgcagcgacatacgcgccttctcccactgtgacaggagcgaccagattggagttgcagcctataaaagcgccgtcttcaatcttggttaaatattttttcttcccatcataattgaccgtgatggagccgcagcccagattcacatccgtgcccacttcggcatcaccgatatagcttaaatgagatgctttgcttcggtcgccgaattgtgttttcttgatttcaacaaagtttccgatcttcacttcattgccgattgcggaatcgggtctgatgtgagcaaaaggaccgatatttacatcattcccaactttgctgcggttgacaacggattgtttaatcacagtgcggctgccgattgaactgtcctctatctcagtgtgagggccgatgacacattcatcgccgatttcagcttgtccctttaacacagttccgggataaataactgtatcttgtccgatacgcgcgtcaggtgagatgtacgtattcatcggatcgattaaagtgactccgttctgcatatgccgtttgttaatacgctctttcatatacatttcagcctgagaaagagcgactctatcattcactccgagcgtctcttggaagttaccagtctggtaagcggcaacagtttcgccttcgtctttgaggatttcgatcacatccggcagataatactcgccttgggcattttcattcgaaacctgttcgatgacacgaaaaagagcctcgttatcaaaacagtacgttcccgtgttgatttctttcacaagacgttcttgctccgaagcatccttgtgctccacgattttttgaacggcgccgtcttcactgcggatgattcttccgtatccggcgggatcgtcggcaacggccgttaacaccgtggcttttgcacctttgtctgtatgttcattcagcatggcttccatcgtctccgccgtcagaagcggtgtatcgccgcaaataacgatcgtgacacccttttctccgtgaagaaatggttttgcctgcttgaccgcatgagccgtaccgagctgttctgcttggagagcgtaatcgcttttctgtccgagctgcttcttcacatcttcggcgccgtgtcctacgatggtgacaagcttcgctaaagataatttcagagcttcgtctgcgacgtgctctaccataggctttccgcataccggatgaaggaccttataaagcttcgatttcattctcgttccttttccggcagctaaaatcactgcaaaccgcttatccatttaatggcctccaatatcccttttatccatagaaaaatatatcctaaatagctgttgatttcaagaagacatcaaaaagtgcaagaattttctatgtaatcgctttattactgaaaaatcagatttaaaaaaggactgccggaaaaggccttgtgtcagcctttatcagcagtccttacattttgttatgtttaagaagccccggcttcttcatattctaatgcttcagaatcacccaaacgatgatactcatttaaaacagcatcctggatcttgccccgcgtgctggaattaataggatgagcaatatcgcggaattctccatcaggggtgcgtttactcggcatcgcaacgaaaagaccattgtttccatcaatcacacgaatatcatgtacgacaaattcgtgatccagcgtgatggatgcaatcgctctcatgcgaccatcggtattcacgcggcgtaatcttacgtcagtaacttccacagtagttcaccaccttttccctatataaaagcattagtctaacaattccacgattctttttaaattcctgcacgtttcaaaaagtttttttgaaaatataggatatacatacacaattaggtgataaaccatatttggggatcatatactgcataaaaaaagtgatcccggagaccggaaccacttttctgagatttaagattttaccagcgcaatgacttcaatttccacgagagcgtctttcggcagtctcgccacttccacacaagaccttgccggcttatgtacatcaaagtattgtccgtacacttcattcacttccgcaaactgctccatatcagcaataaataccgttgctttgacaaccgtctcgagagaagcgcccgcttctttcagcacagcttttaaattgctgaacacctgatgcgtttgttctgtgatatcaccgtttaccatttctccttcagcagtaagaggaatctggcctgagctgtaaaacatgttgtttacgatgattccctgtgaatatggcccgatcgctgccggcgcgtgtttcgtatggattgctttagtcatttttctgtctccccattctttaaatgctgttctttaaaaaatcgcagaaaattgccgttttgaatctcaatcgttttgtctttcatattgatggttgaaagcgtgagcagtgacatgtattcatcgacaagccgttcattcactccctcggcttcaaccaagacgcctatccccgcgacgtttgcattaaactcatcaagcaggctgatcatgccgttaatggtgccgccggctttcataaagtcgtcaataatcaaaacgttcgaacccgtagccaaacttcttttcgcaagcgacattgtttgaatgcggttagacgatcctgatacataattgatgctcaccgtggagccttcagtcactttattgtcctttcgtacgatgacaaccggaacgttcagataactggccgctgcgtaagcaagagggattccttttgtcgcaacggtcatcaccacatcaatctcccgctccgcaaaaacggaagcaaaaagcctgcctacatgagagaggacagatggttttcctaagatatccgttaaatatacataaccgcccggaaggatacgctcaggatttactaaagactgtcccagctcctgtataaacgcttctgcttcagcctgtttcactttcggaatgtatttgacgcctccggcagctcccggcactgtaagcagcgtcccaatgccttgctgttcaaaggtctgtttaataatcgttaaatcttcactgattgatgactttgctgattgataccgttctgagaaaaacgttaacggtattaattcatgcggatgggttaacaaataatttgttaagtccaccaatctgccgctgcgacgaaacttcatgaacttaccccaaaatccgaataatttaaaaataatataacttaacatacggatttaatcaagagcattctgttcgccgatcatccgcaccgcgtacacttgatcacagaaacctcttaacccgttataaatccgctgcacctttgattcgtattgaaccaaaccgaatacagtcggtccgcttccgctcattaacaccgcatcagcgccgaagcgtttcatttgatttttaatcatcgccacctcgggatggaggctgagcgtaaccgactccaatacgtttcctaattgtccgcataccttttggaagcttttttcttcaatcgcgtcaatcatcgcctgcacatcaggatgccgaacctgctgtaagttcagccggcggtacacttcggcagtcgataccccgatcgtcggtttggcgagcatgacccagcaatgaggcggagcactgatgtgcctgatcttctcaccgcgtccggttgccagggcagtgcctccgtatacacagaaggacacgtctgaaccgatttcagctccaagctctgcaagctcttcgacagaaagctttaaatcccaaagcctgttcagccctctgagcgtagctgccgcatcgctgcttccgccggcaagccctgccgctacagggatcacctttgtaatcataatcgaaacgccttttttaacttgaaaccgttctttaagcagtttggctgcctgataagccagattcctttgatcatccggaacaaagcgattatgcgacgccactctgataacgttttcgggcagttctgtcagttcaatccgatctgccaaatcaattgtcgtcatgatcatctccacttcgtgataaccatccgggcgtttactcgtcacatcgagggacagattgattttggccggcgctttttctaaaatacgcatagctttcacctacttctccatctaaacataagtatgaacattgtatcacatttggagacccggaggtacttatccgaaattgacgccggttttgacagccgatagaaaaaaccggggaacggattgtcccccgggccactgcattatcggttattttggttctgagccgccatctgctgttcggcaatctcgatcgcgcgctttaccatattcccggcgtcacgcgcccgaatgcctccccagccctcgtttttcaccgtatcgtaaaaaccaaggtccttcgccagctcatatttgaactcatctgacataactccacgacgtctgcccaaacgaaacaaccccttttatagaattgatcaccattcgtgcacgccacgataaaacatgtgacacctatagcttccgtttaatcggctgaaactttcgagggaataattagaagagctttagaaggcaaaacaaaaagcagtaaacaaaaggttcactgcccattaaaatgctactgagcttgccgcatcgtcattgaatgtcaattcaacagtctcagtcagaatatcagcataactgtatgaaactctttcaaacgaattctcgtcttgatctagttgtatcacaaaaacagaagggtacgtctcagctaaaatgcccgaacgctcaatcgtttttcggcggccgccgtttgcttttaacgtaagccgtttacctaaattcccatcaagcgatctttttatatcggacaacgtcttcgccattgcatccacctcactacatttattgtacaacaagagcccaattttgtcaaataaaatttaaattatatcaacgttaataagtcattgtcaacaaaattattttgacaaaattctattgatttctgcgttatttttcacaagttccggaaatttatgtatcaatatgtaaaataattaacccgcatagcgaaatatatgcgggttttatcactcatccatttgatttatacggcataccgacacgcagcacacccttcgtttcaattcctcccagccctttctctctcgtcagcgtatttctcaggacatcccatacattgatccgctccataaacggagtgaagctgattttcgcgacaatatataccgggtcaagcgcatgaatattgacgcgtgacggcgaacttgcgaaattcgcgcccgctctgattaaagactcaaaatgagattggcacgcccccgcgaatatgaccagctgatccaaatgagggactttacgcctcgctctctgaacggtttcgacaaagtgtttggaatgcctgtaggcgcttaaatcgttcacgcctcccttatgcttggaatatgcatcatggccggtgatgactaaaatatccggcctgtatttatcaagcagctcgtcaattgacgccggcatttttttctcatggcaatgaattccgtataccggcacaccgattttttcataaaagttcaggcactttttcaaataggcctcatcgccgtccagatgcaatacctttccgggcatatgaaagtagtgctcctgatgctgatattgatttgtcgcgtaatactcctgtttttcccgaagcagcttataatcctggcggagcagctcgagagattcattcatcctgctttcatctcttttctttctcatggcctgttcgtcttttctgacaggctccaaatcagaaaaatcagcatccgcaatcaatctgacttcgtcaccatgcaggatggcaattgaatttccgttgcttgtttgctctataccgataatgcgaaataaaacatccatttgataggatttcctggctaccatatctcctatttgaaattgcacgttacccactccacaaatagactaagcctcatcatgaaagaagtcttggcaaatgcacctctttccgctgcggcgcttgatgtttcaagcttttcttgcagttgaatgaataaggttctcctctagcctatgtagcggcagtccaagtggtgacgcaaaacaaaaagccctcttagaaaagggctttatgcaatccgttggacaagagcgcgaattcttctatggacagggattcaccgcgtcgctttccatcaatattcgtttcttgaagaacttcttcaatttgagcttttttctcttttccgcccggaagattgttcacaaggttgttcagcaaggttttccggcgctgtgcgaagcttgctttaatcagctggaagaaaaacggttcattatcgacgtcaaccgccgggccgtcacgaagcaagagacggatgacggcggaatcgacattaggctgaggcacaaacaccgttttcggtacggtcatgacggttttggcctccgtatagaactgaaccgcaatggaaagcgatccgtactccttagaggaaggatcagcggccatccgctcagcgacctctttttgcagcattacgacaattccttttaacggaagatgttcttccaaaagcttcatgatgatcggcgtcgtcacataatatgggagattcgccgtcaccataatttcatcacaatcctgaaactgctcttcaatgacggatttgacgtctgctttcagcacatcttgatgaatgatcgttacattgtcatacggagacagcgtatcattgagaatgggcagcagacgctgatcaatttcaaacgcgacgacctttttcgcccgtttggcaagctgctctgtcaacgcgccgattccgggcccgatttcaatgactccggtccgatccgtaatttccgcatggtccacaattctgtccaatatatttgtatcaattaagaaattctgtcccagactctttttaaaagagaaaccgtactttttcagaatttccttcgttctgataggtgtcgcgatatctttattgttcatcctgttcctcctgcctcatagcatcgagcgcatcaataaaatcacttcttttgatttgaaacatttgcagccgtttttgaagctgcttgccgtttgtatagccgatcttcagcaggtcgcccaatcgttcgcgccgtcttttggcagccggtccgccgatcagaccggcctgtatgacatcttcagctgaaatttcactcggctttgcctccatctcttcatgcacattttccagacatgctctgatgctttcaatggatgcgtgctcaacgccaatgccgcgcttgtttttcggtttggcaagatgtttgggcagaaatgcgtgtttacagccgggtactgcttcagaaatggttttccggatcttctcccccggaaaatccgggtccgtcagcacgatgacccctctcgtttcctgcgccagccgaatctgcctgatgacttcgtctccgattgcggaaccgtttgtctcgatcgtatccgcatcaacggcaagttttatgcgcgcagtgtcatcgcgtccctcgactactataatttctttaattttcattacttcctccaaaaaaactttttatatccaaaacgaaacctttgcttgcatgtcacgtctaatatactgaaaatacactttacctattataacgaaaaaaacagagggcgcaaaaccctctgaatgaatcggaattaatttaagatttttattttgacctgtttctttccccagcggtaagctgaagatttttcagggaaaaagacatcaatccgtcttcctttaatggctgagcctgtatcagcggctacggcatccccgtatccgtctacgtggactcttgtgccgagcgggatgacgcttgggtctaccgcaatgactttggcattcggattgcttgtcaggttaacgcctgtagccgtttggccggaacagccgctgcagcttgcggtataagccgtggaagacacggtaatcactttaccggaagatccggtttcgcccgaagatgccttcacaggtgcactgagctgctcaatcttgggactgtgccgctttgtgccgaccgcaatgatctgatctttgcttttttcagatgtttcttctttgacaagctttcttgatacttcttttccattttctttgacaacatgaaaatgctttttaagtttgccttcttttcctttttgaacgatcttttctttcccgctgtcgagagacgcatcttctttttctttcacttgatacgctattttttcctcaactacatcggtgactttttcgatacgagtgatttgtatgccggcctgattttttgtgagcttttcgtgtaatgccggttttactttatcttcgtctttcatgtccatcttatgctgcgttaaaaagtcagcgaccgtagtcgaagtcgtccatattttctttttctttcccgcatcatttacagtgacctgaaaagccgggtcgaccgtgactttcatgccgtttgtcactttcgtatctgctgctggatctattttatcgtgctgattcacaggtgtatgctgttcgttcagaaatgcgccgactgtttttgccgttgaccataaagtcttttcttctccgcctcttgtcacacggatctgctttgcagcatcatacacgacattcatgttgtctgccaatgctgtctgcttagacggggtaatccggtcttcatttctcgtctctatatgtaaatcttccagaagttccccaaccgtttttgcatgagtgcgtatttgctttttcttgccgttgatggaaacagaaactgattgttttgagagctcatgtgccccgtatgcagtcccggttccgcccagcagaataatagctgcaatcagaataaccttgcttttaccaagctttacggaaaacagttttttcattttttgtgtgatgaaaaacgcctccttctcctcggagagattatatagagtatctaaaatgctgtcaaccctcccatctcgaagatgaaaaaccttcagcgtatccctcattatgcaaaaacaaagcaaaaaaaggaagagagacatatcgacaacctatcttatgaggagaaggaagcttgtagaaccgttttacatatccactgaatcggacaagcttttacacgttatgacagcgcattctgtcagttcatgcggaaaagtctttttgcgttttcggttgtaattgaggcaatttcttcatatgtcagcccttttaattcagcgagctgttcagcaacatattttacgtagcttggctcatttcgtttgccgcggaaaggatgcggtgtcaggaaaggacagtccgtttcaatcagcaaacggtcattcggaatttcctttgctacttcttttggtttcttcgcatttttgaaggtaaccggtccgccgaatgaaatatagaaattcatatccatacactgccgtgcaacctccgtgctccccgtaaagcagtgcataatgccgccgacttcttccgctccctcttctttcaaaattgtgacaacatcttccgttgcatcacgattatgaatgataattggaaggttcacttctttggcgagagcgatttgtttccggaatacttctttctgaatgtcttttggtgatttatcccagtggtaatcaaggcccatctctccgatcgccacgactttttcgtgagaggacagttccttaatccatgataaatcttcctctgtcatgtcaattgcgtctaccggatgccagccgatcgcagcgtatataaagtcatattcctcaatcagctccatcgcacgcgtgatagtgggtttgtcgaatccgacaacgacaattcgttcaactttttcagcctttgcacgcgcaatgacttcctctaagtctgtgtcaaattgctcggcatttaagtgcgcatgtgtatcaaaaagcatcataaaaactcctttcttgttgaaaaacaaaaggtgttcgacggaatgttacacgtgaaacaccttttgcccctattatttaattcgagtgcctttcggtaatgactggtcgacagctacaactttgagaacgccgtccgattctcccgccagtatcattccttgagaaagctcgcctctcagttttaccggttttaaattcgttacacagatgatcttcattcccacaagctgatccggtgtgtaatgcttcgcgatacctgatacaacttggcgctgttcaaagcccagatcaatttgcaatttcagcagccgatctgcttttttcaccggttccgcggacaagacttctgcgacgcgaagttctgtatccataaattgatcaaacgtaatttcaggaagacgctctgcttcttgcggctcttccgccttttcttctttagcaggagcagttccttgcattttttgcttgatgtaagctacttcttcttcagcttcaagacgagggaaaagcggttccccttttttcactttcacattcttcaattggccgaatgtctgaatgctgtcccaagctttaagagactgatcctcaactccgagctgggaaaacattttttcaggcgtctgcgtcaagaaaggctgtagcaatacggccgaaatacgcaatgattcagctaaatgatacatgacagaacgtaattctttttctttttcctgatctttagcaagcacccacggagcagtttcatcaatatatttgttcgtacggctgattaattgccatagcgttgataaagctactgaaaactccatgttttccattgccttttcataagctttaaccgtttcaccggctacggaagaaagctctgaatcaaaatcggtcacatttccttcatatgaaccaatctcgccgtcaaaatatttttggatcattgcgactgtacgattcagaaggtttcctaagtcgttcgccaagtcataattaatccgttctacgaaaccttccggcgtaaagacaccgtctgaaccgaacggtacttcgcgaagcaggtaatagcgaagttcatccaagccgtagcgttcaattaacgttaccggatcaacgacatttccttttgatttcgacatttttccgtctttcatcaataaccagccatgcgcgaatacttgcttaggcagcgggagatcaagcgccatcagcataatcggccagtaaatggtatgaaaacggacaatttctttaccgacaaggtggacgtcagccggccagtactttttgtaaagctcatcattttccgtatcgtaaccgagcgctgtaatatagttgaacagtgcgtcaatccatacatacacgacatgcttcggatttcccggcacttttacgccccagtcgaacgtcgttctggaaacggccaaatcttcaagccccggtttaatgaagttgttaatcatttcatttttgcgtgattcaggctggatgaaagaaggattttcctcataaaacttcagcaggcggtctgcatatttgctcatgcggaagaagtatgactcctctttgattaattcgaccgggtggccgctgtcagggctttttccgccgacaacctcacccttctcatttcgttccacatccaccagctgtgtttccgtatagaatgtttcatcagggatgctgtaccagccctcatactcatccaggtaaatgtcaccattatcaagaagtttttgaaacactttctcgataatttctttgtgccggctttccgtcgtccggatgaaatcatcgtgagaaatgtcgagctgcttccatagcttttggatttcagcaactgcgcgatccacataagcttgaggcgtgatattctcttcctccgctttctgctggattttctgtccgtgctcatccgttccggttaagtagcgtacgtcaaatccttttaatcttttgtaacgcgccatcgcatcgcctgccacggtagtataagcatggccgatatgtaattttccgctcggataatatatcggggtcgtaatataaaaagtattattgtcttgcggcatgttgcaacctcccattcagaatgtcgaaaagctcacgcccaaaggacgagagcggttttatttgatatacaatattgatatttgtcctctatctatgataccatcttagcctttaagatcaaggatatatacgtactgcgcgtaaaagagtaaataaaattaaaaatttttattgaaattaaaaaaagtcttaacatgtcgaaatttgtcgtatataatctactaatataaaacatcttggttcgaaagtcttgatttaaaaggattttcagtaggataataggttcgaaaaagcagtcaaaaagcctgttatttcaggatttccaaggctttacttactataagaactaattcttacaaacaatagcaaacaaaaagattgacgattattggaaaccttgttatgctaggaatgtaaggaattttgtcgaataatgacgaagaaaaatataaactacaaataattatctctcgggaggagactgttaatgaaatctactggtatcgtacgtaaagttgatgaacttggacgcgtcgttatccctatcgaacttcgccgtacactgggcatcgcagaaaaagacgctcttgaaatttatgttgatgatgaaaaaatcatccttaaaaaatataaaccaaacatgacttgccaagtaactggtgaagtttctgatgataaccttaaacttgccggcggcaaattggtactcagcaaagaaggcgctgagcaaatcatctctgaaattcaaaaccagcttcaaaaccaaaaataagctatttcatacaaaaaccgttcttgttatgacacaagaacggttttttttatgattgaatgtgataagcgtcataaatctcgcgtttcggtacgtcccgatctaccgctgtttgttttatggcctgtttggaagaagatccttcatttatgtaatgctccacatgttctttctcagaaagctccgcccaccaaggcttttcctcttcatccggttcagcgccttgattgccttcgacaacgagacaaaactcaccgcggatttgatcttcatttgcccattcaagcacctcggcgatggttcctctgatgaattcctcatactttttcgttaattccctcgtgacggcgatggttcgattacccaaaacgtcatgcattgctgttaatgtttcttttaatctgtgcggcgcttcgtaaaatatcatcgtttcctgccgttttttcaggatttcgagttctttcttcttttcttttttttgtctgtttaagaatccgtagaagaaaaacggctgcggggtgatccctgatgcagtcagcgcggttaatgccgcatttgcacccggaagcggaacgacatatccgccgatttgggtgaaatctctcacaatctcagcccccgggtcggaaattgtcggcataccggcatcactgaccaatgccacattctttccgcttttcagccattcaatgattttatggccgctgctttctttattatgttcatgatagctgatgagagatgtttctatgtcataaacatggcacagctttttcgtctgtctcgtatcttcggcagctatgacatcggccgatttcagcgtctctactgcacgaaaggtcatgtcctccaaattgccgatcggtgtaggaacaaggtacagagttcccatttcagattttccgttaaaactcatctgacgtcttaacatatacagcctccttgctgcgtcgtttttcttctatatattgctcttttttctttcgggtcagctgcttaaaacggtattccgcctgcatcgcttcccgttttgtttcaaatgattccgcatggcataacgaaaccggccttctcgcccttgtatatttcgcgccctttccctcattgtgggttttcagccgtttttgcagatcatttgtataaccggcatacagactgttgtcattgcacagcagcacataaaagaaatgactatttgtctccatataaaatcgtgcggatctctttcgtatattcattttgttcattatatacaaagagcgggggaagaattttgagatcagggcggccgcctttaattccttcaaccaaaatggtattcgcttctttaccttgtttcggataaataaactgaacccgtttcggttctattcggtatgctttcattagttcaaagatttccagaagcctccccggccgatgaacgagagccgcttttcctccttgcttcagcagtttgctgctgacggaaatcacatcttcaagcgtgcaaaggatttcgtgccttgcgattctgagatgctcgttcaggttctgctccgcctctttcggtgttttaaaataaggcggattgcaggtgacaacatcatatttattatgtccgagtctttccggcatatttttcagatcatcatgaatgagactgatctgaccgcccagcccgttgtattccacgcttcgaagcgccatatcatacaagcgttcctgaatttcaactccggtgatatcggcttttgaccttgtgctgagcaaaagcggcacaatgccgttccccgtgcataaatcaacaatgttccccttttgaatcggaacgtatgcaaacttagacagcagcacggcatctaatgaaaaagcgaaaaccgtcggactctgtactattttcatatcctctgctaataagtaatccaatctttcatcatcacgtaatgaaaccataatcttattcctttcggcactctttgaaaaaggcttccgacatcagcggaagccttttccttattttttatttaagaaggacagacaaaaaaggcaatctcccttgcggacgctcccataatggacgttgcaaatatgaaagccttcttgatacagccgggccagattgtcgtacccttctcctatatcactctgctctgccttctgtgtttttgtttctttctgatcggctttgaacttctcaatttgctccgtcgtgtcatcaagccgcttacgcaaatgcttattttcaagctgaagatggtgattctcttcaatcatttcgccgatatgctgctttaagtcacccagctgacggtacagcgaaccgatttgttcctccaggtttatgacagtatcaaataactcttttttatccaaggttccacacctcgttaatctgtggtttgtgcggatacgacgccctcttccaagagctcttcccaagtatattctatcactttttcacgattcttcagttccacctgaagcacccgttccagaatattaagaccgacaacctttgcggggccgtttgccgtcgtaatcatttcgcctaaatccggcagctgttcttttgccgtctcatactcatcattttcatacttcaaacagcacatcaaacggccgcacagaccggaaatcttcgttgggttcaacgataaattttgatccttcgccattttgatggacaccggttcaaaatcaccgaggaacgtggagcagcaaagcattctcccgcatggtccgataccgccgagcattttcgcctcgtcccttaccccgatttgacgcaattcgattctcgttttaaagatagaagccaagtctttgaccaattccctgaaatcaacccgtccgtctgccgtaaagtaaaaaatgactttattgcggtcaaacgtaaattcaacatcaaccagcttcatatctaagccgtggtcagccacttttttctgacagacttcaaaagcggacagggcctcctgtttgttttcttctacaatgagaagatcgcgttcatcagcaacgcgaataacctttcgaagcggaagcacaacatcatgctcgtccacttgtttatttgcgatgacaacctgcccgtattctacacctcttacggtttcaacaatgacgcagctgtcttgttctatatcaaatccattcggatcaaaataataaattttccccgcttttttaaagcggacgcctattacgttgtacaagcttatccctcctgcaacgttaacaccaagtgctccattaatccctgcacattcacattggaatgaagccgtttttttgcttctaaaacagcgagaatttggttcgtaacgctttgttgtgtaaattgcagcgcatgctgttttattgattggaataagtcttgataaatcagtttatcttcatttccaatttggatggataatacatcacggtatatcaataagagcatatcaagacccatttcttgatgggttttttctttgaaaaagggcacccactgatcctgaatgaagaaaaaggcatgtcctttccgctgatgtaagacttcatacaattttatcactttcgctctggactctgcaaactcatcatttcgacttaattcgactgcttccgcaatattatttgtcatatttgctaagagccgggccatgtgagggctcacttcctgttcaatcagtctttcttctatggctttcggctgaagcggctggaacgggagaacctgacatctcgaaacgatggtatccagtattcggtggagctgctcagtaatcagaattgcgatggtgtcttgactcggctcctctaaaaacttcagcagactgtttgccgcatttgtggtcatttgatccgcatgggatataatgtacagctttttatgcgattccagccccgttttggaaaactcttcctgaagcgattggatctgagcctttttaatggataatccgtcgggctgaaccacatgcaggtcgggatggtttccggattcgatacgcttacagttccggcactctccgcaaggctcagtcccgtcttcaaggcaaaaaaagctttttgcgagaagcagtgcggcatccaatttgcccgtaccttttttgccttcaaacagatatgcgtgagaaagccttttcttttcaatgctgttatgcaaaagccgcatcactctgggctgctgcccggtcatttccttccatgatattgccattgtatcactctctatgtgtaaaggttaatcaataaaccttttatttctccgattcgatccagcaaatcaattgccggtttttcctgatctaacatttcttccgtcagctgaagcagtttttcatctatttctttcacaagccccagggtccggctgctgccgtacaagtcaaagcttttctccgtctcatgcgataatccgctgtctacggcctcttttacaaaacgttttaccaatcctttgaacttcgctaagtctttgaagtttctcgacttcgtcagccttttcccgaacgtttctatatccgttaagaacctgctcagctgatcaaatttcagcttgctgctttggctgtccattgaacttttaaacgttccggaaagctctgccgctttataagcaggctgctgctttttctcaataaatgtacgtaagtcagaatttattttcacgtcgtcaaatccttaaaattgatgaaattcatcgaccgggaggacaaagaccgtcgctccgccgacttccacttcgacgggatatggaacgtaggaatccgcattcccgcccatcggggataccggggcaatcatctgatcacgtttacagccattctctttaatgaggctgagcgctttatcgacacggatatcttccaccccgatcataaacgtcgtattgcctgatttaaggaatccgcctgttgtcgcaagcttcgtcaccctgaagttgtggtcggttaatactttcaaaagcctgttgctgtcctgatcctgcaccactgccactattaatttcattctctaggccccctttaggttggaaagaacattgtcgttacattcattatagcaacttatgagaaacaggtcacaactgaatttttttcaatgcttcatttatcacttgaagtgcgtcctgaatgacgagttccttctttttcgatgcgtcgattgtatggaatctttccggaaaacgctgcataaccttttggtatccttcccgtactttcgtgtgaaagtgcagagcctcaagatcgagacgattcttttctcttgaatcattcgacgtaatccgtttcaacccttcttcaggctcaatagaaaaatagatggtgacatcaggcatcgtatcgccgattgcaaactggttaatagaaagaacttcatcaatgccgagccctctcgcatagccttgataagccagcgaactgtcgatgaaacgatcacacagcacaatgcgcccttctttcaatgcaggctgcaccttttcggttaaatgctgtcttctcgccgcggcgtaaagcagcgcctccgtttttgcatccatcagtgtattgtttttatttaagatcacttctctgatctgttccgcaatgtcgatgccgcccggttctcttgtcgctgtcaccgggagcccctctgccgacagaatctctttcagttcctgaagcacagtcgttttccctgcaccttcaggaccttcaaatgttataaataaaccgctcatgatttctcctcttctatatagacaagtaattgttccccgtttaacaagccttgaatatgcgcgtccatgccgattaaacgggaaagcttctgtacgatctcttctgttatccgttcgccgtccatgatcagcggaattcccggcggataaggaataatgttccccgcatgcaagcgcccggccgccttatttatatctgcaggctcttttgtaaacttccgcatctcattttgcggatattcaagtgtcgaaatggacggaaatgtccaattcacggcatccggcaatttatcgggcggtgtattctccagtttctgctgtatgtttcttacggctgcctgttctatcatccgccggccgcctatcgacagtacgagcaatacttggtactcgtcagccagctcggcaacaatgccctcactctccaaaatgcgttgtaatgaatagccggaatgtccgagctttgaccgaagtattaattttaacgggtccgcccgcagcccatatccggaaggctcgattatttcaatagaagaaattgatgcgaaccttcgtttgattttctcaatgtgctccatatggacgggaagtgtccctttttcagcaatatcctgcacataagcacgcgccgtatctaaagatgccataatcgggtatgacgggctgctgctttgcaaactgcttacataataagttaatcgatctctgtcaattcgggtgctgtttaaatgaaagtaagatcccatcgtcatagccggaagcgttttgtgagccgattgaacaacggcgtccgcccccatagccaatgatgaaggcgggaaaggctgccctaacacaaagtgagctccatgagcctcatccaccagcacaggaacaccgtatgaatgggcttttttaactgccgcagtcaaatcggcggcgtgtccgtaataagtcggattggtcaaaacaagtcctttcgcgttcggatatgacgccagcgctttttcgatgactgaaagagatacatgtgccggcacatgcatattttcatcgatttccggcgccaaataaaccggcttggctccggccaatgccaccgcatggaaaacagacttgtgacaattacgctggatcagaatgggttcacccggttcacaaacagctaaaatcatcgccagattgccggcggtcgttccgttgacgagaaagaagctttcctgagagccgtacaatctgctcaccaaatcctgcgcttccttaatgacccctgtcgggtgatgcaagtcatcaagacccgtgatctcagtcatatcaatagataaaagagattgatatacagatttcgcttcatcaaaaaagacatctccattgtgatgtcccggaacatgaaaagaatacgtatttcggtgcgcatgcttcatcagcgctgtatataaaggtgtgtccatttttaaacaaatcctttgcctgtctttcttattatatcgtgcctgcgagccaacttaaagctaagactttttgccatctagccgttatcccggccggaactcatatcaagcagcttcttttttaaatcgccttccatgataacaagctcctcctcggcacgcctgcgtttcatcctgccttcttcttgaatagacatgatttcttcaagtgtgctgactaagctttcctgcacttttttgagggtgtctgcctcaacaagtccgcgctcattggctttggccgtctcgactgtgcttgttttcagaagttcggcgtttttcagcagcaattgatttgtcgtatccgccgccttcttctgcacatctgccgcactccgctgcctcataagcgtcagcgcgatggcgacttgattcttccataaaggaatagccgtaacaatggaggactgaattttctctgccagtgcctgattcgtgttttgaatcagacggatttgcggcgcactctgaagcgtaatctgcctgctcagcagcagatcatgcaccctcttatccagacggtcggcaaactggcgaagatcattcacttcctgtgcggccatttgattgtgttttcgtaattcggcttttcttgccacttcgggaataagctttgttttcagctcatctaattttaattcacccgctgctatatacatagttaaatcagaaaagtattgtttattttggacgtacagctgatctaaccatttattgtcactcaacagcacatttttagaatgttccagccttctgctgatacggtcaatctgcacacttgtcttttgatatttcgaaagcacttcctgcacagatccggatacccttttaaacagccgggcgaaaaaccctttgttctttacctgcagatcatcggggtttacctggtcaagcttcagcatcagatcagccaatatctgtcccatctctcctgcatcttttctttgcacgtgctctatcatcgtgtgggaaaattccagaagattcgcctgcgcctgtgaaccaaacagaacaatgctttgcatgtttccagggtccagtttttcagcgagctgaagtgccgcttctcttttttcttccggcagcgtatctgcaagctttagatgagtctggtcattttgggcgcccatactgtcgtcggaacggtctttggccatttccttcttcctttcttattttctcagtgaatgctttgccatatctaattcaaagtgcaggtcgtcgatgtcctccttcatcagttcatgaagatcttcttccagccttctggaaagctccgccagagtcatcctcgtctcactcaaggacattgataaatctttattttttcgcggctgtgatgagagcaaagcatacttttccgtcagttccacaacagaatcaagcgtttgataatagaaacgctctgcctgataaaaacgcttcggctcctgctttgtgagcagatatattcgtcgggttatccgcagtatctctgcattctgcttcagcatttgtatacttttagagcggaaaagcgccctgcgtaatcggatgattttaccctttgcttcctcgagattttccttgatataagcatattcttttcttgtcagccggtgtttttttaaaaagagacgcttcgcattccacaagccggacgcactgactgcggctccgccggccgccccgtataaaagcgaatacagaaaaggctggtgccctatcgtaaagaaggttatccccgctaatacaaaaactgtgctgccgcaaaatgtccatttcatatattgaataaacggtttcatacttgatcgactcctatttattcacttttatcagtattatctattacattccatgtctaaacaagttcctcttcttatcgtatcagttcttttataaaaagtgaaaaaactcctctgatttcaggcaaaaaaaagacccttttcagggttaagaatataacgtcggtgtatgaaggcttttcaatttacgaacgaaaaattcataattcggatcagaggtcggagtggaaactactttcttctcacactctaaacatataaatttcgtataaatatggattcccctgcttttcttggtttcacacacaatacatgtttcttcatggccggacgtttcattcattttgcccacctccgtatgaatagccttcccttaaactgttgattgtatacacaatttggatctttttgaagtttgcaattagtatatgggcgttcccgtatttcggtgtttgtttcgtttttattcaaaaacaaaaaaggcagctcatgatgagctgcctttaccgtaatgatagcttggcggcgtcctactctcacagggggaaacccccgactaccatcggcgctgaagagcttaacttccgtgttcggcatgggaacgggtgtgacctcttcgctatcgccaccaaaccattgagagtgttctctcaaaactagataacagtaagcatacattcaaattggttaagtcctcgatcgattagtatctgtcagctccatgtgtcgccacacttccacctcagacctatcaacctgatcatctttcagggatcttacttccttgcggaatgggaaatctcatcttgaggggggcttcatgcttagatgctttcagcacttatcccgtccgcacatagctacccagcgatgcccttggcagaacaactggtacaccagcggtgcgtccatcccggtcctctcgtactaaggacagctcctctcaaatttcctgcgcccgcgacggatagggaccgaactgtctcacgacgttctgaacccagctcgcgtaccgctttaatgggcgaacagcccaacccttgggaccgactacagccccaggatgcgatgagccgacatcgaggtgccaaacctccccgtcgatgtggactcttgggggagataagcctgttatccccggggtagcttttatccgttgagcgatggcccttccatgcggaaccaccggatcactaagcccgactttcgtccctgctcgacttgtaggtctcgcagtcaagctcccttgtgcctttacactctgcgaatgatttccaaccattctgagggaacctttgggcgcctccgttaccttttaggaggcgaccgccccagtcaaactgcccacctgacactgtctccccgcccgataagggcggcgggttagaaggtcaatacagccagggtagtatcccaccgatgcctccaccgaagctggcgctccggtttccaaggctcctacctatcctgtacaagctgtaccaacattcaatatcaggctgcagtaaagctccacggggtctttccgtcctgtcgcgggtaacctgcatcttcacaggtactataatttcaccgagtctctcgttgagacagtgcccagatcgttgcgcctttcgtgcgggtcggaacttacccgacaaggaatttcgctaccttaggaccgttatagttacggccgccgtttactggggcttcaattcgcaccttcgcttacgctaagcgctcctcttaaccttccagcaccgggcaggcgtcagcccctatacttcgccttacggcttcgcagagacctgtgtttttgctaaacagtcgcctgggcctattcactgcggctctctcgggcttgcaccctaacagagcaccccttctcccgaagttacggggtcattttgccgagttccttaacgagagttctctcgatcaccttaggattctctcctcgcctacctgtgtcggtttgcggtacgggcacctctcacctcgctagaggcttttcttggcagtgtggaatcaggaacttcgctactataattcgctcgccatcacagctcagccttcacgggaaacggatttgcctatttcccagcctaactgcttggacgcggatatccaataccgcgcttaccctatcctcctgcgtcccccattgctcaaatggtgaggaggtggtacaggaatatcaacctgttatccatcgcctacgcctttcggcctcggcttaggtcccgactaaccctgagcggacgagccttcctcaggaaaccttaggcattcggtggaggggattctcacccctctttcgctactcataccggcattctcacttctaagcgctccacaagtccttccggtcttgcttcacagcccttagaacgctctcctaccactgttcgaagaacagtccgcagcttcggtgatacgtttagccccggtacattttcggcgcagagtcactcgaccagtgagctattacgcactctttaaatggtggctgcttctaagccaacatcctggttgtctaagcaactccacatccttttccacttaacgtatactttgggaccttagctggcggtctgggctgtttccctttcgactacggatcttatcactcgcagtctgactcccaaggataagtcatcggcattcggagtttgactgaattcggtaacccggtagggcccctagtccaatcagtgctctacctccgagactcttaccttgaggctagccctaaagctatttcggagagaaccagctatctccaggttcgattggcatttcacccctacccacacctcatccccgcacttttcaacgtgcgtgggttcgggcctccattcagtgttacctgaacttcaccctggacatgggtagatcacctggtttcgggtctacgaccacgtactcaattcgccctattcagactcgctttcgctgcggctccgcatcttctgcttaaccttgcacgggatcgtaactcgccggttcattctacaaaaggcacgccatcacccgttaacgggctctgactacttgtaggcacacggtttcaggatctctttcactccccttccggggtgcttttcacctttccctcacggtactggttcactatcggtcactagggagtatttagccttgggagatggtcctcccggattccgacggaatttcacgtgttccgccgtactcaggatccactcaggagagaacgaagttttgactacagggctgttacctcctatggcgggcctttccagacctcttcatctacctcgttcctttgtaactccgtacagagtgtcctacaaccccaagaggcaagcctcttggtttgggctggtcccgtttcgctcgccgctactcagggaatcgcatttgctttctcttcctccgggtacttagatgtttcagttccccgggtctgccttctcatatcctatgtattcagatatggataccactccattacgagtggtgggtttccccattcggaaatctccggatcaaagcttgcttacagctccccgaagcatatcggtgttcgtcccgtccttcatcggctcctagtgccaaggcatccaccgtgcgccctttctaacttaaccgttaaaaagaatcactacgtgatatcttgcattactaattgaatgtgaattacttctgttatctagttttcaaagaacacgttggtggagcctagcgggatcgaaccgctgacctcctgcgtgcaaagcaggcgctctcccagctgagctaaggccccgtattgggtaaagatggtgggcctgagtggactcgaaccaccgacctcacgcttatcaggcgtgcgctctaaccagctgagctacaggcccatctaccatatgaaagaatcaaaattccttcaaaactaaacaagacagggaacgttctgtttataagacccaaggtcttatattccgttaaaatccttagaaaggaggtgatccagccgcaccttccgatacggctaccttgttacgacttcaccccaatcatctgtcccaccttcggcggctggctccataaaggttacctcaccgacttcgggtgttacaaactctcgtggtgtgacgggcggtgtgtacaaggcccgggaacgtattcaccgcggcatgctgatccgcgattactagcgattccagcttcacgcagtcgagttgcagactgcgatccgaactgagaacagatttgtgggattggcttaacctcgcggtttcgctgccctttgttctgtccattgtagcacgtgtgtagcccaggtcataaggggcatgatgatttgacgtcatccccaccttcctccggtttgtcaccggcagtcaccttagagtgcccaactgaatgctggcaactaagatcaagggttgcgctcgttgcgggacttaacccaacatctcacgacacgagctgacgacaaccatgcaccacctgtcactctgcccccgaaggggacgtcctatctctaggattgtcagaggatgtcaagacctggtaaggttcttcgcgttgcttcgaattaaaccacatgctccaccgcttgtgcgggcccccgtcaattcctttgagtttcagtcttgcgaccgtactccccaggcggagtgcttaatgcgttagctgcagcactaaggggcggaaaccccctaacacttagcactcatcgtttacggcgtggactaccagggtatctaatcctgttcgctccccacgctttcgctcctcagcgtcagttacagaccagagagtcgccttcgccactggtgttcctccacatctctacgcatttcaccgctacacgtggaattccactctcctcttctgcactcaagttccccagtttccaatgaccctccccggttgagccgggggctttcacatcagacttaagaaaccgcctgcgagccctttacgcccaataattccggacaacgcttgccacctacgtattaccgcggctgctggcacgtagttagccgtggctttctggttaggtaccgtcaaggtgccgccctatttgaacggcacttgttcttccctaacaacagagctttacgatccgaaaaccttcatcactcacgcggcgttgctccgtcagactttcgtccattgcggaagattccctactgctgcctcccgtaggagtctgggccgtgtctcagtcccagtgtggccgatcaccctctcaggtcggctacgcatcgtcgccttggtgagccgttacctcaccaactagctaatgcgccgcgggtccatctgtaagtggtagccgaagccaccttttatgtctgaaccatgcggttcagacaaccatccggtattagccccggtttcccggagttatcccagccttacaggcaggttacccacgtgttactcacccgtccgccgctaacatcagggagcaagctcccatctgtccgctcgacttgcatgtattaggcacgccgccagcgttcgtcctgagccaggatcaaactctccgataaagtgtttgactgactacgcacatcgctgtgcgatttatttaaaactttgaattaacaggtacgttttgtcttgtttagttttcaaagaactttgtccatcgctcttgaagcgacttaattattataacatctcagtgtcattgtcgtcaataactttttaaaatttctttttcaagaattcgtttcgtcatcagcgacgtatattagaataccacccttgatccaacatgtcaacaataatcgacaaattaaatgatgaagcgtttaatgactatcaaagccgcgataccgggaatcccaagaattccgctgatgcccgttgtaatcaggttaacagggatatgaatacccagactgccccgaacaagttcacacccaccaacagaatcgcgccggcaataaacttaatggcagtcacaccaatccaccttaacggttttgaagatactccccataaaaaaagcaaagcaaccagaccgacaatcaaaccgataatgaaaaaaggctccatgaatcttccccctcgcttgtttagtacaagcttatgagaagattccggagaatagacctcttacttccatctgctcattttcaaattccgctgcttcgcttctttcaaataaaaaaagtacttagattcagcgactttcagctcaaacaacacctcagcggagggctctagacttttctcgaccagactcttctgtctgttccattcttctttttgtttaaagagctgttctatcagcttctcgtcaaactcttttcttaatgtatttctgcgaagaaaacccatgccttgccttttcctcccttacaattcacgtcttccttcaagagcttttgaaagagtgacctcatcagcatattccaaatcaccgccgacgggcagaccgtgggcaatacgggagagcttgatgcctgagggctttaacagccttgatatatacatcgctgttgcttccccttcaatattagggttggttgcgagaataacttctgtcacttgatcatcctgaagacgtttcagcagctccggaatcttaatatcctccggaccgatgccgtccattggtgaaatcgcgccgtgaagaacatgatactggccgttatattccttcattttctccatcgcgatcacatccttagggtcctgcacgacacaaataacagacttatctcttcttgtgtcctcacatatataacaagggtcctgatctgtaatatgtccgcaaatcgagcaatatgtcagattccgcttcgcattgacaagcgccttagcaaaatccaatactgtgtcttctttcatacctagaacaaaaaaagccagacgaaccgctgttttcggtccgatccctggcaatttcataaagctgtcaatcagctttgatattggttcaggatactgcatgtttatttatccccctagaataaacccggtatgttcattccttttgtaaattgtcccattgtctcattcgtcatgtcatccacttttttgagggcgtcgtttgtcgcagcaagaaccaggtcctgaagcatttcgatatcttccggatcaacaacttcttctttaatggcaacgtctacaacttctttttggccgttgacttttacagtcaccataccgccgcccgcagtgccttcaagcactttttcagcaagttcctcctgagccttcgccatatccttttgcattttttgcatttgtttcatcattttttgcatgtttcccattccgccacgcatattcaatcactctctttcatcttattagtcttttatttcgattaaatccgctccgacaagttttttcgcctctgcaatcagcggatcttcttcagccggttcgtttgatccttcactttcctgctggtgatcatttaaaaattcttctcttattttaccccattgtgcttccggaacgccaatcaaatccattcttttcccgagcattgattcgagaatctgttcaagattcgtacggactccgttattgtcttctgcaaccattttacaatggatttcgtatttaaatttaagcacaaatgccttttgagcagcggccaccggttcactgtcattcaaaagagccgcatgagacaccttattctgctgtttcaggtgtgccagcagcttgccccagctgcttttaagctgttcaagatcaggtcttgtggcttccttcaatatctcatgaattcttccgaccggggctttataatggctttttccgcctttttgaggacgcggagcttctttcggagcgctttccatctgaaccttcacaccggaggttttcagcctttctacttcctgctcaagctgctggatcttattcatcagcatgccgacctcagggatgtctccggcggattgctgtgccgtttggcatattttcacgacagccacttcaaaaaagattcttgggtggttcgtccacttcatttcctgatggcttttattcaggatatcaatcatctcatataaagcggggccggtatgtcaccgctcagattccgaaacgtttcatcgaccttcaccttctccaggactccttctaaaccgggagcggcctggtacaagagcatatccctgaaatagaaaatcatatcttcaatcagtttggccgcatctttcccctgctggagcaattcattcagtgtttccaatgcctcggaaacctgtttgcggtgaagagcagatgccagttttccaatatagtgctgagaaacggctccggtaatgagcaaagcgtcatccaccgacagctcctcgccgctgaatgatacagcttgatcgagcaggctcagcgcgtccctcattcctccgtccgcagcactcgctatgatatcaagggctccttcttccaccttcagctgctctgcatcgacgattgtcttcattcgtccgacaattgctttggatgtaatccgtttgaagtcaaaacgctgacatctggagataatggttaaaggaatcttatgaggctcagtcgtagctaatatgaaaatgcaatgtgccggcggttcttccagcgttttcagaagcgcattgaatgcgccgatagagagcatatgcacctcatctataatatataccttgtaagtaacggccgacggggcaaattttactttgtcacggatgtcgcggatttcgtctacgccgttattcgacgccgcatctatttcaatcacatctgatatagagccatttgtgatccccttgcatgccgcgcactcattgcacggttcttctacaggggcgtgctcacagttgactgctttcgcaaatattttagctgcactggtttttcccgttccccgcggtccagaaaacagatatgcatgagaaaatttcttttgcaaaagggcattttgcagcgttttcgtaatgtgttcctgtccgaccacatcttcaaactgctgaggcctaaatactcgatataaagcttggtaacccacaggatgcgccctcctctgttattcatcatgtttattatacatgaacgtgcttttaacgccaaaacccgtttttcatatacgaaaaaactcacctgccataacaggtgagtctgaaatttgatgattgatttaccgtgcaccttctgtcgattcgctaccctaagcgttacttaagcagttagctcagcccaggcaaccctgcggcacatgagaggtttcacttaatgctgcttccttccggacctgacatggttcatgaattcccattgcgcaggacccagacgtcaacgccacttacttaaggcagaccttacagtaaacgaacctcgagaagggattcggccccgctagagcggattgcgggtacagggcaccgctacctccccgcttagcacggcaaaataaatatcaaattttgatatgcgcaccattcatgatgcacacataagtatatctgcttcaggcagaaaatgcaaccgtactactcagacaactttttcctcatgtctttcttttgccggcgcagctttctgaaaaaagcgctgagcatttctccgcactcttctccgagcacgccgctcaccacttccgcttggtggttgaaccgctcttcctgcaagaggttcatcagcgttcctgtacagcccccttgggatcaaatgcgccgaatacgaccttatcgactctcgaaagcacgacggctcccgcgcacatcggacacggctccaaagtgacatagagaacggcatcctcaagtctccatgtccccagcttacggcacgcttcgtctatcgccagcatttcggcgtgggcaagcgacctctgttcagtctcccgcagattatgcgcccgcgccacgatctcatcgtgcagaacaagaactgctccgatcggcacttcacctttctcttcggctttcttcgcttcttttatggcttctctcatataatattcatcattcatcggttcgagctctcttcttaagttttttcatgtctcataaaggttaaaataggaataccccagcagaaaggagttgccggtattgtctgaacctaacaacacagcccttctgattgtcgatatgatcaacaattttcaatttgatatgggcgaacgtcttgctgaaaaaaccaaacaaattgtcccccgtattttatcattaaagaagcatgcaaaacaaagcaactggccgattatttatattaatgatcattacgggctctggaaggctgatattgatgccatcagggaggaatgcagcaacgacagaagcgcctccattataaaagatatttcgcctcagccggatgattattttctcattaaaccgaagcattccgctttttacgaaacggcgcttcacacccttctgaccgaattacaagtgaaccgattaatcatcacggggattgccgggaacatttgtgtgctgttcacggccaacgacgcttatatgagagaatacagcattgccattccgaaagactgcaccgcttccaataacgacgaagacaatgatttcgctttgaccatgatggagaatgttctcttcgcagaaataaccacggaaaaacaaattaccggcgaaaaataaacatgatcagcctccttttttcatatatttgatagcggatatgaaaggaggcgtttttcattcagatctatatagtgaaacggggcgacacgctttccgctattgcggcgcgctaccggacagccgcaaatgtcattgcggaagcaaataaactgcctaatcccaatacattggttgtcggacaaacccttgtcatcccgattgagggtcaatattacgaagtaaaacaaggtgatactctcgcgtcaatcgccggccgttttcatatatcggccgcggagcttgcgagggtgaacggaattcagcccggcaccacattgagagtcggaacccgcctttacattccgcagcaggcgaataagcccgatatcgaatcaaacgcatatatagaaccgcggggaacgagcgtaagcgctaatcttcagcaggcggcaagggaggcctctccttatttaacatacctcggcgcattcagttttcaagtgcagcggaacgggactttaaaggaaccgcctctgaccaatttaaaaagcatcagtgacaggcacaacaccacactgatgatgatcatcaccaaccttgaaaatgacgcattcagcgatgaactcgggcggctcatcttgaacgacaatacagtgaaaacaaaactctttcaggaaatcgtctccacggctaaaaagtacggctttcgcgatattcactttgatttcgaatatttacgtccacaggacagggaagcctacaatcgttttttacgtgaagcgagaacgatttttcatcgggaaggctggaagatttcaacggcgcttgctccgaaaacgagcgcgactcaggccggcaaatggtacgaagctcatgactatagggcacatggagaaatcgtcgatttcgtcgtgattatgacatatgagtgggggtacagcggaggcccggctgaggccgtatcacctatcggccctgtaagaaatgtcattgagtacgcgctgacggaaatgccttcttcaaaaatcgtcatgggccagaatatgtacggctatgattggacactgcctttcaaacagggaacgacagcgaaagccgtcagtcctcagcaggcaatcgctctggcagcacgctataaagtcgacattcaatatgacgaaaccgcccaggctcccttcttccgatacacggatgcaaatcagagacggcatgaagtatggtttgaagacgcacgatccattcaagcgaaattcaatttaattaaagaacttcatttaagaggaatcagctattggaaactcggcctttctttcccgcaaaactggcttttgctcggcgatcaatttcatattgtaaaagagacgtttcgttaattgggagcgtcttttttcatgggcttttctgtgagtgtgatacaatataaaggccggcagctgacggatgtttgcagaattaaggaggattttcaatgaacagagccccttttatcgcggtagaaggtcctatcggggcaggaaaaacgacactcgctacgatgctttctgaagagctcggttttcctatgattaatgagattgtggaagacaacccttatctcgataagttttatgacaatatcgaggagtggagtttccagcttgaaatgttttttctatgtcacaggtataaacagcttgaagacaccgatcgagattatttaaaacaaggacagcccgttttgtccgattatcatatttataaaaatgttattttcgcagagcgtacattgcacggccaaaagcttgagaagtataagcagatctatcatctgctcactcacgacctgccgaagccgaatatcattgtatacataaaggcaagcctgccgacattgcttcaacgcattgaaaaacgcgggcgcccgtttgagaaaaatatcgaacatcaatatctggaacatctcattgcagattacgacacagccatcagacagcttcaggaagaagatccggatatatctgtactgaccattgacggtgatactgaagactttgttttgaataagacagactatgaaagaattgcccgtcaggtaaaggagcttattaaatgaaagacattcatattccaaacaacgccattataacagtagcgggaacggtaggagtcggaaaatcgactttgaccaaagctttagcaaaacggctcgggtttcatacctcacttgaggaagtggatgaaaacccttatttagagaagttttatcacgattttgaacgctggagcttccatttgcaaatttattttctggctgagcggttcaaagagcaaaaaaacatgtttgaatcaggcggcggattcgtgcaggaccgttcgatttatgaagatacaggcatattcgcaaaaatgcatgccgataaaggaaccatgtcgctgacagattacacaacatacacaagcctatttgaggcgatggtcatgacgccgtatttcccgcatcctgatgttttgatctacttagaaggcgaccttgaatacattataagccggattgaaaagcggggccgcgagatggagctgcagacaaaccgctcttattgggaagagatgtatacacggtacgaagactggatcagcggttttaacgcctgccctgtactgaaagtacgcattgaagattatgaccttgaagctgatgaacagtcactggaacctttgatcgaaaaaatcagtcacgtgatcagcgaaaacagaaacaaataaaaatagcaaagcgattttccccgaacagagaaaatcgctttttttgcatataaaaaatccgctgcatcagatgcagcggacaaaacaatctccaatatatgctcgagtttcattaggtttaaaatcaatatggcggaggaagagggattcgaacccccgcgggctttgacacccctgtcggttttcaagaccgatcccttcagccagacttgggtattcctccgtatcgacatttaataatataccacatgacccaaatttcagtcaagcgctttttcatattttttatttcatttcttaaacagcttttccgtcagctttactatcatacaaaagtcttgcgtccaattcaacctcagtatgccatacgggcaggaaaacaaagtaaaaatcaagaatagattcaaacagataacctgctcataaaggtggagaacataatgaaaatcatcatcgcacccgattctttcaaagaaagcatgacatcaaaagaagccgctgacagcatagaaaaaggattcaaagcggtcttccctgacgcggaatataccaagatacccgcggccgacggcggagaaggaaccgttcaggctttgacggatgccactggcggaagcatcatcaaaaaaactgtgaccggtccgctgggaacgccggtaaacgccgcatatggacttctgggagacggacgcacggcagtcattgaaatggcggaagcatcgggactccatctcgttccccgccatctcagagatccgttgaacacaacgacaagaggaacgggtgaactgatagcggatgcagcctcccgcggggcgagtgagatcatcatcgggcttggcgggagtgcaaccaatgacggcggaacaggaatggcgagcgcgctcggtgtgcgtttcttaaatgaggaaggtcaggagatacatgacggaggaggcgctctgcacaccctagcttctattgatataagcgggctctcccctgatctgaaacatatccgttttcgtgccgcatgtgatgtcgaaaatcccctgaccggtgaaaacggcgcgtcatatgtcttcggcccgcaaaaaggggcgtccgagaagactaaagttgtattggatcgcaatttataccatttcgctgacgtattgagacgtcagcacgatatcgaagcggataccgtaaaaggcgcgggcgccgcaggggggctgggcgctggactgatcgctttcttacaggcagaaattcaaagcgggattgacgttgtattagatacactgtccttctcagatcagataagagatgctgaccttgtcattaccggagagggccagattgacggacaaacgatattcggcaaaacccccgccgggatcgccgcacgcgcagccgctcaagaaattcccgttatcgcattggcgggctccttaggcaaaaattttgagcatgtttacagcgcaggaataacagctgtattttctatcgtgcccggcgctgtaagtcttgaagacgccttagcatccggccgttttaacctggaaagtacagcccggaatgccgccgctctataccgggcagcaaaaaaggcgcgcctctagggcgcacctttttatggtttgatgacttctttatttcccatataaggacgaagcactttaggaatgatgacacttccgtcttcctgctggtagttttccaagatggcagctacagttctgccgactgcaagacctgaaccgtttaatgtatgcacatgctcaggcttgcctttcgcttcgcgtctgaaacgaatgttcgcacgtcttgcctggaaggcctcaaagttgctgcaagaagaaatttcacggtatgtgtcttggcttggaatccatacctcaatatcgtactttttcgcagctgtaaagccgagatcaccggtacacatgctcatgacgcgatacggcagttcaagcagctgaagcacccgctcagcttgatttgtcagtttttcaagctcctcataagaatcttccggcttcacgaactttacaagctcaaccttgttgaactgatgctgacggatcaaaccgcgtgtatcacggccggcggatcccgcttctgaacggaagcaggcgctgaacgcggcataattgatcggcaggttctcaccggataagatttcatcgcggtgcatatttgtaatcggcacttccgccgtcggaattaagaaataatcctcttctctgattttaaaagcatcctcttcaaatttaggaagctgtcccgtacctgtcatgctcgtacggtttaccatataaggaggaatgacttccgtgtaatcatattcatccacgtgaagatccagcataaagttgtagagcgcgcgttcgaggcgggcgcctaatcctttataaaacacaaaccggctgcctgttacttttgaagcgcgttcgaaatcaagaatgtttaagcggtctgcgatatcccaatgcggtttcggctcatatgaaaatgccggcgcctctccccacttgcgaatttcaatgttatcatcttccgtttctccgacgggaactgaatcgtgcgggatgttcggaatagacagaaggatggtttcgagcgtcgtttcgacagtacgaagctcttcatcaagcttcttaatttcttcgcctacttcacgcatctctttaataatatgatcagcgtcttttttctcccgtttcaaaacggcgacctgctgagacacctcattgcgttttcccttcagttcttctactttaccgataagctctcttctcttttcatccagctcttcaaacttgtcaaagtcagataagtcttcgccttttggaatgagcttcgcttttacctcttgaaaattggctctcagcaccttcgtatcaatcatgcctaacaactcctatctgtttttatcgaaaataaaaaagagccctcatcccctaaaagggacgagagctctcgcgttgccaccctgattgaaaacaagctcacacttgctttccgctttaacacataacggttttcccgtaaatgcctacttgttttcagcatttcgctcaaggacggattcggacagcatctttcaccgattcgcaccacccatcggctctctttgaaagaggggcttcctactgcttcctgtcaacgcttttcgatctttatttgtgattataatgtactataagtatcagcggttttcaactgttttatacagctgtttcctgcttatgcttttccgccatcttcacaaacagctctgtcacccggtgatcatccgtcagttcaggatggaacgagcagccgaggaaatttccctgctttgcagccacgatgcgtccgttatgctcacaaagcacttcaacatcttctccggcttttaaaatatgcggtgcgcgaataaatacacccgtaaacggctcatcaaggcctttaatcgtcagatcagcttcaaagctgtcgacctgacggccaaaggaattacgctcgacaactacgttcaacagccctaaatgagcgttatccgttcccgctatctctttggctaagataatcagaccggcgcatgtgccgaacatcggcttgccttgagcggcaaactcgcgaagcggctccataaaatgatacgtatccattaaacgccgcatcgtcgtgctttccccgcccggcaggattaagccgtcgatgtcattcagctgttcaggacgcttaatgacgacaccttttgaaccacatgcttcaattgaacgaatatgttctcttactgctccttgaagtccaagtacaccaattgttaacatgcttacagctctcctatggttttaccagccgcgttcttgcatacgctgttccggcaatagatttgagatttcgatgcctttcattgctgtgcctaattctttagaaagctcagcgatcagtttgtagtctgtataatgagtcgttgcttcaacaattgctttggcgaatttagcagggttgtctgatttgaaaatacctgaaccgacaaatacgccgtcagcgccaagctgcatcatcaatgccgcgtcagcaggcgtcgctactccgccggcagcaaagttcactacaggcagtttgccgtcacgtttgatctgaagaagcagttcataaggagcgccgaggtttttagcttcagtcatcagctcatcatcgctcatcgcaacaactttgcgcacttgcgcgtttacttttctcatatggcggacagcttccacaatgtttcctgttcccggttcgccttttgtacgaagcatggaagctccttcggcgatacggcgcgttgcttcgccgagatcacggcagccgcatacgaacgggactgtatattcatttttatttaaatgaaattcttcgtcagccggagtcagaacttcactttcatcgatgtaatctactcccattgcttcaaggacacgcgcttcaacgatatgtccgatacgcgcttttgccattacgggaatggatacagcattcattacttcttcaacgattgtcggatcagccatgcgggcaacaccgccggcagcgcgaatatcagccggaacgcgttctaacgccattacggcaacagctcccgcctcttccgcaatcttcgcttgttcagcatttactacgtccatgatgacgccgcctttttgcatttccgccatgccgcgttttacacgatcagtacctgtttgagccattatttggtccccctagtcaatgtatagttagataatgtctatctcttattgtatcccagaaatacaatatttcatatgggtattcttattttacagcgagatgaataagatagatatcatttttttactaataatttggttttttcagtatattaagcaaaagagccctaactttcatcagagctctttcttatttcttaaaaccagcctgttaccgtgtcaacggcgctgttccagataccggagaaaaatccgccgatgccgcgcatcatctgaacaaaccagtttgctttatctacatcatttttcgttacaagattcacgctgaactctttggatttgaggaagccatagtctttgtcactgcctttgtatgtaactgtcagcgttccgactttcgttccctttttcacaggagccgtgatttcttttttatctatagtcccttcggctttatagttcttttcatccccgcttttcacaggaatagaaagcgccttgtcagtaacaatatcgacttgcttgtctttccctttttcaacgtcaaccgttttgtgcccttttacttgagagccttcagggtaaagatctttcattgagaaattgctgttaaatgcgtaatcgagcatttttttcgtttcatcaaaacgtccggtatgcaggttgccttttgcgtttaatacaacggtgatgacccgcattccgttccgctgtgctgtgcttgtaaaacaagatcccgcagaatcagtagaacccgtttttaagccgtcaacgccagggtattcagaaacaagaccttttaacatgaagttccagttcggcatgtccatttcatcatcagtgccggctctgaatttcgttttagcgatgcttgttgttttgagaacttccggataatcagtgatcaggcggtctgcaagaagcgccatgtctttagcagaaacttcactctcttctttaacgccttctccttgcggctgtttgccgtgaagatcttcattcacaagccctgtggcatttttaaaatcatagtttgtcatgcctaattctttggctttcgcattcatttcagcgacaaatttcgtttcagttccggcaagaatttcggcaactgcaatcgcggctccgttagcagagtaaatcgccatggcctgatacagttctttaaccgtgtatttgccgtcttttcgaagggggacgtttgataaactgttgtcttgagaaatttcatagacataatcatcaggagtatacgtttgatcccatttcacttttccttctttaatggcttccagaagcagatattcagtcatcatttttgtcatgctggcaatcggcagtcttttgtctgcatttttactgtataaaatttttcccgatgaagcctcaatcattatcgcagctgatgcgttgacatcaatcgggtcattgccggctgcctccgctttagacatcggaacaaagcaagttgcggccagtgccagtaccactaatgacaccaacagctgtttccatttcgtgatgttcaatcttacgacctccgtcattcattttaaatctataattaagccgttaaggacatattcaaattcaaaacacaacagtataaattttatcacactcgatataaaaaaaatagacagagtcagcgaccctgtcaaatgttttttatttgtaacaattatgagattgtgtagtttggtgattctttcgtaatttggacatcatgcggatgactttcgcgaagaccggcacctgtcatacggatgaattgagcctcttctcttaaagcgcgcaagtcttttgaaccgcaatatcccatacctgaacgaagaccgccgacaagctgatacactgtttcttctacaggacctttgtacggagtccgtccttcgataccttcagggacgaatttcttattttcttcttggaaatatcggtctttactgcctttttccatggcagcaacagaacccataccgcgatacactttaaatcttctgccctgatagatttcagtctctcccgggctttctgaagtaccggcaagcaggcttccgagcattacggcatgtccgcctgaagccaacgctttcgtaatatctccggagaatttaataccgccgtctgcgataattgtcgcgccgtgttttctcgcttcagtggcacaatcataaatggcagtgatctgcggtacgcctacacctgcaacgacgcgtgtcgtacagatagaaccaggcccgattcccactttgacaatatttgctccggcttcaatcagagcttttgtcgcttcagccgttgcaacatttcctgcgataatgttcagttcaggatatgtttcacggattttcgcaactgtgttcagtacgcctctggaatgtccgtgagccgtatcaaccacgataacgtcgacattcgcttcaacaagcttgctgacgcgtgtcattgtatcgcctgtcacgcctaccgcagcgccgacaataaggcgtccgtgttcatctttagatgaattagggaattcgataaccttttcaatatctttgatcgtgataagaccttttaatttgttttggtcatccactaacggaagtttttcaattttatgtttctgtaagattttttctgcttcgtctaatgtggttcccacaggagccgtaaccagctcttcttttgtcatgacatcactgattttcattgaataatcagagataaagcgaagatcacggtttgtaatgataccgacaagcttttgatcgtctttattatctacgatcggaacaccggaaattctgtatttccccatcaaatgctccgcatcgaatacttgatgatcaggtgttaaaaagaagggatttgtaataacgccccgttcagaacgtttgactttgtcaacatgttcagcctgctgttcgatggacatgtttttatggataatgcccaagccgccctgtctggccatcgcaatcgccattgctgattctgttactgtatccattcccgcactgatgacaggaatattaagctttaacgtttttgtcagttcaacagataaatccacatcacgcggaagtacgtctgattgagccggtacgagcagtacatcatcgaacgttaagccttcttttgaaaatttactttcccacattagtaaatccccctcttttcggcaaaatattatatgtagattatcaactagaaaacagcatgtcaaggaagcgaaaaagagttgaaatatttagataaaggaaagggtttaaaaatacatatgagagatcatgagtggaaagagttatcattattttattccgtagaatcttcccagaaatttctaaacaaagtctatacagaaagcggcatggaagaaccaaaacgatatgcgtttaagaacagtgagcgcttcatattctttatcaaacacgccgagtccttttataagcaggcatctctttctcctttagaaattaagcctattctgttgttttacgggatgtcacaattgctgaaagcctgccttctgaccacagatccaagctacccaagccacgcttcagtactcgcgcatggcgtgactgcccggaaacgcaaaaagcaaaattactcctttagggatgatgaagtgaaggtgcagcgcaatggcttatgtattcatgtaatgaagcacttattcgggatagctggtcttgaggaagaacggtacacaatgaagaaattactgacagccatacctgaattgcatactgtcttttacttccaagagaaaaagaattggatgacccaagtagagctgaacgatgaccttatttcagtgcctgagcatgcggtgattcattacaatatgtctgattcccgctttgctgaatatatcagccatcatttgaagtggtcttttctgaggaaagaccataaccacttgttttttgaggctgacccgatagacagggaaccttggtcttctccaaatttattgtttcacttggagaaaaatcaatattacattccctctcagcgtgatcacttcctgcatcttccggaaatgattattcattatttggttctctacaatattgggatgattgcgagatatgaaacggagtggtggtatgaactgctgacacagcatgtcagtgatgattatgtgatgatccgacggttcttagaggtcacggaacgcaaatttccgtattacgtttctaaattcctgaagcaatacttgtaaacaaaaaaggcagctcatgatgagctgcctttaccgtaatgatagcttggcggcgtcctactctcacagggggaaacccccgactaccatcggcgctgaagagcttaacttccgtgttcggcatgggaacgggtgtgacctcttcgctatcgccaccaaaccattgagagtgttctctcaaaactagataacaataagtatacattcaaattggttaagtcctcgatcgattagtatctgtcagctccatgtgtcgccacacttccacctcagacctatcaacctgatcatctttcagggatcttacttccttgcggaatgggaaatctcatcttgagggggcttcatgcttagatgctttcagcacttatcccgtccgcacatagctacccagcgatgcccttggcagaacaactggtacaccagcggtgcgtccatcccggtcctctcgtactaaggacagctcctctcaaatttcctgcgcccgcgacggatagggaccgaactgtctcacgacgttctgaacccagctcgcgtaccgctttaatgggcgaacagcccaacccttgggaccgactacagccccaggatgcgatgagccgacatcgaggtgccaaacctccccgtcgatgtggactcttggggagataagcctgttatccccggggtagcttttatccgttgagcgatggcccttccatgcggaaccaccggatcactaagcccgactttcgtccctgctcgacttgtaggtctcgcagtcaagctcccttgtgcctttacactctgcgaatgatttccaaccattctgagggaacctttgggcgcctccgttaccttttaggaggcgaccgccccagtcaaactgcccacctgacactgtctccccgcccgataagggcggcgggttagaaggtcaatacagccagggtagtatcccaccgatgcctccaccgaagctggcgctccggtttccaaggctcctacctatcctgtacaagctgtaccaacattcaatatcaggctgcagtaaagctccacggggtctttccgtcctgtcgcgggtaacctgcatcttcacaggtactataatttcaccgagtctctcgttgagacagtgcccagatcgttgcgcctttcgtgcgggtcggaacttacccgacaaggaatttcgctaccttaggaccgttatagttacggccgccgtttactggggcttcaattcgcaccttcgcttacgctaagcgctcctcttaaccttccagcaccgggcaggcgtcagcccctatacttcgccttacggcttcgcagagacctgtgtttttgctaaacagtcgcctgggcctattcactgcggctctctcgggcttgcaccctaacagagcaccccttctcccgaagttacggggtcattttgccgagttccttaacgagagttctctcgatcaccttaggattctctcctcgcctacctgtgtcggtttgcggtacgggcacctctcacctcgctagaggcttttcttggcagtgtggaatcaggaacttcgctactataattcgctcgccatcacagctcagccttcacgggaaacggatttgcctatttcccagcctaactgcttggacgcggatatccaataccgcgcttaccctatcctcctgcgtccccccattgctcaaatggtgaggaggtggtacaggaatatcaacctgttatccatcgcctacgcctttcggcctcggcttaggtcccgactaaccctgagcggacgagccttcctcaggaaaccttaggcattcggtggaggggattctcacccctctttcgctactcataccggcattctcacttctaagcgctccacaagtccttccggtcttgcttcacagcccttagaacgctctcctaccactgttcgaagaacagtccgcagcttcggtgatacgtttagccccggtacattttcggcgcagagtcactcgaccagtgagctattacgcactctttaaatggtggctgcttctaagccaacatcctggttgtctaagcaactccacatccttttccacttaacgtatactttgggaccttagctggcggtctgggctgtttccctttcgactacggatcttatcactcgcagtctgactcccaaggataagtcatcggcattcggagtttgactgaattcggtaacccggtaggggcccctagtccaatcagtgctctacctccgagactcttaccttgaggctagccctaaagctatttcggagagaaccagctatctccaggttcgattggcatttcacccctacccacacctcatccccgcacttttcaacgtgcgtgggttcgggcctccattcagtgttacctgaacttcaccctggacatgggtagatcacctggtttcgggtctacgaccacgtactcaattcgccctattcagactcgctttcgctgcggctccgcatcttctgcttaaccttgcacgggatcgtaactcgccggttcattctacaaaaggcacgccatcacccgttaacgggctctgactacttgtaggcacacggtttcaggatctctttcactccccttccggggtgcttttcacctttccctcacggtactggttcactatcggtcactagggagtatttagccttgggagatggtcctcccggattccgacggaatttcacgtgttccgccgtactcaggatccactcaggagagaacgaagttttgactacagggctgttacctcctatggcgggcctttccagacctcttcatctacctcgttcctttgtaactccgtacagagtgtcctacaaccccaagaggcaagcctcttggtttgggctggtcccgtttcgctcgccgctactcagggaatcgcatttgctttctcttcctccgggtacttagatgtttcagttccccgggtctgccttctcatatcctatgtattcagatatggataccactccattacgagtggtgggtttccccattcggaaatctccggatcaaagcttgcttacagctccccgaagcatatcggtgttcgtcccgtccttcatcggctcctagtgccaaggcatccaccgtgcgccctttctaacttaaccgttaaaaagaatcactacgtgatatcttgcattactaattgaatgtgaattacttctgttatctagttttcaaagaacacgttggtggagcctagcgggatcgaaccgctgacctcctgcgtgcaaagcaggcgctctcccagctgagctaaggccccgtattgggtaaagatggtgggcctgagtggactcgaaccaccgacctcacgcttatcaggcgtgcgctctaaccagctgagctacaggcccatctaccatatgaaagaatcaaagttccttcaaaactaaacaagacagggaacgttctgtttataagacccaaggtcttatattccgttaaaatccttagaaaggaggtgatccagccgcaccttccgatacggctaccttgttacgacttcaccccaatcatctgtcccaccttcggcggctggctccataaaggttacctcaccgacttcgggtgttacaaactctcgtggtgtgacgggcggtgtgtacaaggcccgggaacgtattcaccgcggcatgctgatccgcgattactagcgattccagcttcacgcagtcgagttgcagactgcgatccgaactgagaacagatttgtgggattggcttaacctcgcggtttcgctgccctttgttctgtccattgtagcacgtgtgtagcccaggtcataaggggcatgatgatttgacgtcatccccaccttcctccggtttgtcaccggcagtcaccttagagtgcccaactgaatgctggcaactaagatcaagggttgcgctcgttgcgggacttaacccaacatctcacgacacgagctgacgacaaccatgcaccacctgtcactctgcccccgaaggggacgtcctatctctaggattgtcagaggatgtcaagacctggtaaggttcttcgcgttgcttcgaattaaaccacatgctccaccgcttgtgcgggcccccgtcaattcctttgagtttcagtcttgcgaccgtactccccaggcggagtgcttaatgcgttagctgcagcactaaggggcggaaaccccctaacacttagcactcatcgtttacggcgtggactaccagggtatctaatcctgttcgctccccacgctttcgctcctcagcgtcagttacagaccagagagtcgccttcgccactggtgttcctccacatctctacgcatttcaccgctacacgtggaattccactctcctcttctgcactcaagttccccagtttccaatgaccctccccggttgagccgggggctttcacatcagacttaagaaaccgcctgcgagccctttacgcccaataattccggacaacgcttgccacctacgtattaccgcggctgctggcacgtagttagccgtggctttctggttaggtaccgtcaaggtgccgccctatttgaacggcacttgttcttccctaacaacagagctttacgatccgaaaaccttcatcactcacgcggcgttgctccgtcagactttcgtccattgcggaagattccctactgctgcctcccgtaggagtctgggccgtgtctcagtcccagtgtggccgatcaccctctcaggtcggctacgcatcgtcgccttggtgagccgttacctcaccaactagctaatgcgccgcgggtccatctgtaagtggtagccgaagccaccttttatgtctgaaccatgcggttcaaacaaccatccggtattagccccggtttcccggagttatcccagtcttacaggcaggttacccacgtgttactcacccgtccgccgctaacatcagggagcaagctcccatctgtccgctcgacttgcatgtattaggcacgccgccagcgttcgtcctgagccaggatcaaactctccgataaagtagtttgactgactacgcacatcgctgtgcgatttatttaaaactttgaattaacaggtacgttttgtcttgtttagttttcaaagaacttttccgcccctctcgaagcgacctcttaatcataacattttcagtttgctaggtcaatacttttttaaaaaatattttcgctaggcttgcctttctattaaaaagacaacaaaaagaattatatcagcatcatcaccatgtgtcaaagcttttttttatttctttatatagtaaaagcgcagcctgttgcagctgcgctttttcgtttatacttcttccgtttcttccggctcttcttcattcttttcgacaagcgccacagtggctacatgctcttgatcagacatgcggatcagacggacgccttgtgttacgcgtcccgtagtggagatatcattaatatccattctgattaacacgccgcttgccgtaataatcattaagtcctcttcgccttttgttgctttcacagttactaacggaccgttgctgtcagtgattttacatgttttaaggccttttccgccccggctttgaactctgtattctgaagccggtgtgcgtttgccgtagccgttttctgtcactatgaggacatgggagtcttcttcaagaatctccatgcctacaacgacatcatcgtctgtcagcgtgatacctttaacacccgcagctgtgcgtcccatttgtcttacatcttcttcagggaaacggatcagcaaaccgttcttcgttccgatgatgatttgtttcttgccgtcagtcaggcggacggccatcagttcatcgtcttcccggagacctagggcgatcagaccgttattccgtatattcgcaaactgggacagtgccgtacgtttcgacaccccttgtttggtcgtaaagaagaggtattgctcctcatcaaacgtgctgaccggaataatggcattaatccattcgcctttttcaacttccagaaggttaataatcggaatgccttttgccgtacggccgtattcagggatttcatatcctttagaacggtataccttccctttattagagaagaacagaatcgtatcgtgcgttgatgtggaaattaagtgttccacaaagtcatcttcattcgttcccattccctgtacgccttttccgccccgtttttggctgcggtatgtggacgccgggagacgtttaacatagccgttatgggtcagtgtgatgacgatattttctctctcgataagatcttcatcttcaattgtttcaagaccggacgtcacgatttcagtgcgtctctcatcattgaaacgctctttgatttcattaagttcttcacggatgatctcaagaactctttcttcattggctaaaatatctttcagctcagcgataagcgcaacaagtgattgatattcctcttcaatcttttcgcgctccagaccggttaatcgctgaaggcgcatatccagaatagcttgcgcttgtttttcagtcagtgagaattgttcgatcaaacccgttctcgcaatttcagccgtctgggaattgcggataagagaaataacggcatctaaatgatcgagagcaattcttaaaccttccagaatgtgagctcttgcttccgctttgcggagttcgtaagccgttctgcgccggatcacaaccttttggtgatcaagataatgctccagacattgtttcaggcttagtaccttcggctgtccgtcaacgagcgccagcagattgattccgaaagacgtctgcagggccgtttgtttgtacaggttattcaaaatgacgtgagcattggcgtcacggcggatctcaatgacgattctcattccgttacggtcggattcgtctcgcagatcggtaattccttcgatttttttgtctcggacaagatccgcgattttttcaattaatctcgctttgttcacctgataaggaagttccgtgacaataattctttcttttcccgatgaagtctcttcgatttcagccttagcccggatcgtgattgatccccgtccggattcatatgccttgcggatgccgctccggcccaaaatctgacctgcagtcggaaaatccgggcccgggatgtattccatcagctcctggtttgtaatctcaggattctcacttacggcaagcacgccttcaatgacttccccaagctgatgcggggaatgtttgtcgccattccgaccgcaataccggcagccccgtttacgagcagattcggaaatctcgaaggcatgacggcaggctctctttctgaaccgtcatagttatcttgatagtcaatcgtgtctttcgtaatgtcacgcagaatttccattgcgatttttgacattctcgcttctgtgtaacgcatcgcggccgctgagtcgccgtcaaccgaaccgaagttgccgtgtccgtcaacaagcatgtagcggtagttaaaatcctgcgccattctgaccattgattcgtaaaccgctgagtcaccgtgcgggtggtacttaccgataacttcaccgacgatacgggcagattttttatatggtttgtcactggtcatgcctaaatcattcattgcgtacaaaatccgtctgtgaaccggcttcagaccgtcacgcacatccggaagcgcccgggatacgataacgctcattgcatagtccaggaaggatgtccgcatttcctgactgatattgacttcacgtacttgtggtgtgttttgttcactcattaaaaaaacctccctgaagtatcacatgaaataatgtgggagtagattgtccattatgatcttcaatacgatttcactattctccattatatcaataaacttgtgtttatacacattaatttagtagaatatacgggttttgcgggttttcagaggctttagaagccgctttgagaaaaaagccttatttcttaacgaaaataaggctttcttggttaaatatcaagatttttcacgtatctggcgtttgcttctatgaagtttctccgcggttctactttgtcacccatcagcatttcaaaagtctcgtcagcgtccattgcatcttcaagattgacttgcagaagcgttctggtcgcagggtccattgtcgtttcccaaagctgagtcgcgttcatttctccaagacctttataacgctggaggccgggcttaggtgattgcggaagctcttttaacagctcatcaagctgcttatcgttataagcgtattccacccgttttccctgctgcactttataaagcggcggctgggcaatgtagacatagccgttttcgatgatttcccgcatgtatctgtagaagaacgttaataaaagcgttctgatatgggcgccgtcaacatcggcatccgtcatgatgaccactttatgataacgcgctttttcaagattaaaatcttctccgattcctgttccgagggccgtgatcattgatctgacctcattgtttgagagaatcttatcaagtctggctttctcaacgttcagaatcttaccgcgcagcggcagaatggcttggaaatgacggtcccgtccctgtttcgctgatccgcccgcagagtcaccctctacgatatacagctcggaaatgctcggatctttagaagaacagtccgccagtttgcccggcagattggaaatctcaagcgcacttttgcgccgggtcaattcccgggcttttttcgccgccatccgcgctcttgcggccattaaacctttttcaacgattttgcgggctgagtccggattttcaagaaggaatgtttccagcgcagaagaaaacagcgtatcagtgatcgttctcgcttcggagttgccgagcttggttttcgtctgcccttcgaattgcggatcagggtgcttaattgaaataatggcagtcagcccttctctcacatcatccccgcttaaattcggatcattttctttgaaaatcccttttcttcttgcatagtcgtttatgacacgggtcagaccggttttaaatccggcctcgtgcgtgccgccttcgtatgtgttgatattatttgtgaaagaataaatattgcttgtatagctgtcgttgtattgcaatgcaacttcaaccgttatgccgtctttctcgccttcgatataaatcggctcttcatgaacgacttctttggaacggtttaagtactcaacatagcttttgattccgccttcgtagtggtactcgtttttccgttcttgtccttcacgtttgtcttcaatcgtgatgtttacgccttttgtcaggaaggccaattcccggacacggtttgaaagcagatcatagtcatatacagttgtttctttgaaaatttccgggtccggaacgaagtgcgtaatcgttccggtcttatcagtttcgccgatcacttcaagatcggccacaggtacaccgcgctcgtacgcctgataatggatttttccgtcacgatgaaccgtaacgtcaagagtggtcgacaaggcgtttacgacggatgcccctacaccgtgaagaccgccggatactttatatccgcttccgtcaaatttaccgccggcgtggagaacggtcatgatgacttcaaccgcagggcggcccatcttctcctggataccgaccggaattccgcgcccgttgtccttaacggtaatgctgttatctttttcaatctcgatgttaatatctgtacaataaccggccagggcttcgtcaatactgttgtcgacgatttcccacaccaaatggtgaaggcctttgctgttagttgatccgatgtacatccccggtctctttcgaacagcttccaaaccttctaatacctgtatctgattctcatcataactattttgctgctgttccatagccatgcacattcacctacacttttcttaaacgataatatattcattgtaaagatccgctaagaatctatttctaacataaattgcgcacgtttcttcagtgtgccggaagataagggagagtaatatatattctcagtcgtgactacgatagactttggcgtgccgtttacggacggcactactttttctttctgtctgtccagaaattcttcaacgatcggcgatacattgaccttgcagtcaaaaatgccgacgatatcgcgggttgaaacgacaaagtcgtcacctaaatgaatatacaatcgctcacctcatttcttcacttcactaacgcaccgttttccacacggaacattcctgcttgatgtaaggtatcgtggtcaatgccatccacgctcgtcgtggtgacaaatgtctgcacacggccttggatcgtatgaagcaaatgggactgtcggtaatcatccagctcgcttagtacatcatccaaaagtaaaatggggtattctccgatttcttcatgaatcaaatctatttcagccagctttagagacaaagccgtcgtacgctgctgtccctgcgaaccgtaagtctgcacatcgcgtccgttcacataaaaaaggacatcatcccgatgcggtccgaataatgtgacgcctcgttctatttctttttcttttaatttcgaaaaagactcctggtagctgttacctattttcgacaaatctttgggatctgatacatcaagcgccgtgtgatacttaagcgtcagttcttcaagtccccgggaaatgccggaatggatcggctgcgcccatttttcaagctgcgccgtaaactgcagacgtctggcgacaacttttgcggctgcttcaatcagctgatcagtgagaacgtcaagcatggtccggtcagtctgtttccggctttgcagctgtttcagaaaatgattccgctgtgaaaggattttttgataaagagataaatcatacagataaacggcagaaacctgcccgatctccatatcgagaaatcttctcctcacctgagggcttcctttgacgagatttaaatcctcaggggcaaacataatggtgttcagcgctccgacatactgactgagtttttgctgctctatatgattgaccttgccctttttaccttttttggagatgacaagctgcatcgggatgtccccgttgcgcttcatcactcttccttctattttagcatagtcttcgtcccaccgtataagttctttgtcatttgaggtgcggtgtgattttgccatcgaaaggacatagatggcttccatcagattggttttgccctgggcattttccccgatgatcacattcaccttgttttcgaattgaagctcagcgcgctcataattacggtaggatgttaattctaaattttggatatacaaccgctgtcacccgctttaattgacgacttgaaatgaaccaaatccttcaatcgcgaccacgtctccaacgtaaagctttctgccgcggcgattgtcaggttcattgttgacagtcacctcatgctcgctcagaaaccacttcgccatgccgccggactgaatcacatcagctaattttaaaaactggccaagcgtaatcatttctgtatcaatcgaaatcggatttgccataatatcgacctctttcaaatatcactaatatctaattgtactaaaaaatcctgaaataaggaaagggaaaacttgagggagcggctgatgaatagaaaagctgccgaactaagccggcagcacattctgtttgattaatacgttctgaccggaaggatgagctgaacgatggtctcatcattcggcgtacggataagaaacggtctcatcgctcccgtaaagctgatacggatgtccgctccttcaagtactttcagtgcgtccatcatatattttggactgaatgaaatatttaattcctcgccgtcaatcttgtctgccagcacagcttcgaccactttcccgatttccggagaatttgatgaaatctcaagcgaatccgccggtttggcagaaagttttacaacgttgttgcggccttctctcgccaataaagaagcacggtctatcgcctgtaaaaattccttcgtgttcacgacgatttccgttttgctttcctgcggaattaagctggtcgtgtccggatagtttccgtcaagcaatcttgagaagaacaatacgtttttcgctttgaacagaacttgggtttctgtaatgacgatatccaccagctcttggctgtcatcaagaattttgcttagctcggttaagcttttcccgggaatgaccacgttataagtactgtcttccggaatatcaagcttcgcctttcttaaagcgagtcggtggctatccgtggcagtgcataataattcaccgttttcaactttccagtttacacctgtcaagatggggcgtgtttctgaggcggacacagcgaacacggtttggcggatcaggtttttcaaaagatccgtcggaatctgaatggcgtgatgctcttcgatttgcggtagatgcggatattcatctgcatcaaggccgtttaaattaaattcggcttttccggaacggataatcgttaaatattgattttgaacttcgatttcaacagtcgccatcggcagttttttaacgatttcgctgaagaaacgcgcttgcagcacgatacttcccggctgatcgatcgtcacgatttctttatcatcatcttctttcggaatgaatgactcaattgaaatatcagagtcacttcctgtgaaagatactccttcatctgaggcgacgatcttaataccggtgagaatgggaattgtggttctggatgaaacggcttttagaacgtcttgtacactttcgactaaccgatctttttgaatcgtaaatttcatgtttatcctcctaacggataatataattaatatatttttaaaaatagcagtagtaatagtagggcctgtggatttgtggataagttgtgaaaaagacaggaaacacagcctatccacatgtggacagactgtgtatggctatgaaaaagttattcacactttccccgattcatccgaggacactattatttaagcagttcttttatttctttcacctgctgctgaagctgctcgtcatcaatcagcagttttgaaatcttttcgtgggcgtgaatgacggttgtatggtctctcccgccaaattcttccccgattttaggcaaagaagaatccgtcatttctcttgaaagatacatcgcaatttgtcttgggaaagccactgatttcgtacgctttttcgctttgaaatcttcaagcttaatgttgaactgctgtccgacaatccgctgaatctcttttatcgtaatgaccttcggcttagaagacggaataatatctttcaatgcttctgcagccaggtctgcgttaatgtctttattgattaaggatgaataggcgacaacccggattaatgccccttccagttcgcggatgttgctgtcaatctgattggcgatgtaaagcatgacctcgttcggaatatcaaggccctccgccttcgctttctttctcagaatggcaatccgcgtttccagatccggcggtgtgatgtctgtaatcaatccccattcgaaccgcgaacgcaggcggtcttcaagggtcgggatctctttcggcggtctgtcactggaaatcacgatttgtttgctttcttcatgaagtgtgttgaatgtatggaaaaactcttcctgtgtttgttcttttccggctaaaaattgaatatcatctatcaaaagtacatcaacgttccggtagcggttgcggaaatcaacggctttattatcgcggattgagttgatgaattcatttgtgaatttttcagaagacaggtacaccactttggctgaaggattatgatcaatgacataatggccgatcgcgtgcattaagtgggtttttcctaaaccgactcccccgtatataaataaagggttgtacgctttagcgggtgcttccgccacagccagtgatgctgcatgggcgaatcggtttcccgatccgatgacgaatgtgtcgaatgtatatttcgggttgagcatgctttggggaaaatcagacggttcctcttttgccgcttttttcacttgcggtttcggcaaaaagtcttcttcgtcctgattttgaggaatgacaaatttgacgctcaattcttccccggttaattcatatatggtatctgcaatgagatgtaagtacctggactccagccagtctctggcaaattcattgggagcggtgatggttaaggtatctccttgcagcgaatgggctttcgtcgacttcatccaagtttcgaaactcggtttgcttagctttttctcaatttgagctagagcttgattccaaagatccaatatattctccattatccggcacagccctccttttctttaaaaatcagcgcccttcccctgttatagaacacaaaaaaagagcatatggctctgaccattcgtacacacgaaatgttgaaaacatatagtatagtagaaaaatagcttttcgacaaattccacaagttgtggacaacaatctacacaagctgtgtgaaaacaatccacaacttatccacaatttgtggataaagagaatggactggataagtaattaagagttaaaacacaaatataatatcaaattaagcgaggacttgcaatggttctcgtaatcttatccacaaacctgacaacttgttgaaaaatctttgtccacaggggttagcaatgtgaaaatgttgtcgataacgattgtggatattaaaaaaagaccgaaaaattatccacatgtcgttttttcgggggagcgcggctttttttgtgcgttaaaaaaaggaatatgaaaaataaggtttctaatctggttaaggtatgttatcctattatggttgtaagaaataaaagcactgctgaagttgacaatgaataggcagcacaaatataataagtaagactgtctttaacagctattcctcgagggaggtgtcataaatgaaaagaacattccaaccgaataaccgtaaacgcagtaaagttcatggcttcagaagccgtatgagttcaaaaaacggtcgtctagtattagcacgccgtcgccgcaaaggcagaaaagtattatcagcttaggccactgaataatgtcagtggtcttttttcacattaagagaaaagagatgtcatgcgtcgcccggtactggagaaatttcttcagtattccggcggcccgttttttttagatagaaataaaagtttctgcgagtgaatatcggagtgaattaaagtgaagaagcgaaatcggttaaagaaaaatgaagattttcaaaaagtgtttaaacgcggaacgtctatggcaaaccgccagttcgtgctgtatacgcttgatcagccgaaacaggaagagctccgggtagggctttctgtcagtaaaaaaatcggcaatgccgtcgtgcgcaatcgggtgaagcggttaatcaggcaggcggttcaggaggaaaaagagctgctcaagccgaaagattttattattatcgcaagaaaacccgccggcgacctcagttttgaagaaacgaaaaagagtctgcagcacttattcagaaaaacctcattatataagaaatcttcgtcaaaatagctcatattttgttttcttcacgtttttaaaagcgcttccttttatttggcgaaaaatgaacgccatttgaaactgaaagatgctaaaatacatacaaggtttataaagattggtataggaggaaacgttcttgaaaaggagaatatggttactactgagtatggtcggtatgctcgtgctgctggccgggtgctcgagtgtgaaagagccgattacggcgaatagtccgcatttctgggacaaatatgttgtgtatccattgtcagaagtcattacgtacgtagcgaaactgacgggcgataactatggtttgtcgatcatcatcgttacgattttaattcgtctgctgattctgccgctgatgatcaagcagcttcgaagctcaaaagcgatgcaggcgctgcagcctgaaatgcagaagctcagagaaaaatacagctctaaagatcaaaaaacgcagcagaagcttcagcaggaaacaatggccctgttttcaaagcacggggtaaacccgctggcgggatgtttcccgatcctgattcaaatgccgattttgatcggattctaccacgccattatgcgtacgcaagccatttcacagcacagctttttatggtttgatttaggagagaaggatccttactatattcttcctatcgttgccggtgtggccacttttgtccagcagaagctgatgatggcgggaaatccgactcagaatcctcaaatggcaatgatggtatggattatgccgatcatgatcatcgtatttgcgatcaacttcccgagcgcgctttctctgtattgggtagtcggaaacctgtttatgattgctcagacattccttattaaaggacctgacattaaacacgatccggaaacgcagaaagccggaggaaagaaaaagtgaagaaggtgactgctgcgggacggaatgtcgaagaagcagttcaatcaggccttcaggaacttcaactgacgaaagatcaagtagaaataacggtggtgcaagaagaatataaagggtttttgggtattttcggaaaaaagaatgcgattgtagaactggaagagaaaagaaatcctgttcaggaagcgaaagcgtatttagaagaaatcatccattccattgccgggccttctgagattgttacggaagaaaacaagaaaacagtctgttttcatattaaaggtgaaaaagcggcgctgcttattggcaaaagaggacaaacactcaatgccttggaaacattgacgcagcttgttttgaaccgcggctccggccagtatcgccaagccgttgtcgacgctgaaaattatcggcggaaaagaagagaaattctggatcagctggcaaacaggctggccaagcaagtgtcgaaaacgaaaaaagaggtgcatttagaaccgatgccgtcaggtgaaagaaaaatcatccatgacgcgctgtcaaagcatccaaatatcaaaacgttttctaccggtgaaggccggtaccgccatctcgttatttcccataaagatagcagaaaaccgaagtccgggtaaaatcggaacttcggtttttttattggtaaaaatggctctattcctgagcagaatcgcattttttgcgtttaagttttttctttttaggtctatgctgttgataaaaaaggttttaggaaataaaattaattgttattcacatgtggataagttaaagtaataagggatgaatttctgcctttgtggataacgtatcttccacttcaaaccaaactatgttatcttttaattttggcgtaaataaaattttttatatagatggaaacagagataaagagaggtgaacagtatggatacaattgcagcgatttcaactccgatgggtgaaggcgcgattgcgatcgttcggctgagcggcccggaagccgtaaagatcgccgacaaaatgtacaagggtccgaaaggcaaaacgctcagttcggcagaatcgcataccattcattacgggcatatcgcggacagtacgacgggacggattattgaggaagtcatggtgtctgttttaagagcgcccagaacattcacaagggaagatgtcattgaaatcaactgtcacgggggtattgtgacggttaatcaggtgctccagcttgctttaagagaaggtgcgagactggcagaacccggtgagtttacgaagcgcgcatttttaaacggacggattgacctttcacaggcggaagcggtgatggatctgatcagagccaaaacggaccgtgccatgaatgtcgccatgaaccagatggaaggacggctttccgcgcttgtccgccgtctgcgtgatgagttgttagaaacacttgcccatgttgaggtaaatatagattatccggaatatgatgacgtcgaagaaatgacgcatcagcttttagtggagaaggcaagcggcgtgaagaaagaaatcgaggcgctgctccgtacgtctgagcaggggaaaattttgcgtgagggactgtctaccgtgatcatcggccgtccgaacgtcgggaaatcctctctgcttaacagccttgtccatgaaacgaaggcgatcgtaaccgatattccgggaacgacgcgtgatgtgattgaggaatatgtcaacgtgcgaggcgtgccgcttcggcttgtcgataccgccggaatccgtgagacagaagacatcgtcgaaagaatcggtgtggaacggtcacggcaggttctgaaggaagcggatctcattttgcttgtgcttaaccacagcgaagcgctttctgaagaagatgtgaaattgtttgaagcggttgagggaatggacgtcattgtcattatgaataagacggaccttgaggctaagattgacgctgagcgcgtcaaggaactggcgaaaggccggcctgtcgtcacgacctcattgctgaaagaagaaggcattcaagatttagaggaagcgattcagtcgctattttatacaggagcgatcgaaagcggagatctcacctatgtcagcaacacccgtcatatttcgattctgcatcaggcaaagcaagcgattgatgatgcgctgaacgggattgaacaggatgttccgattgatatggtgcaaattgatttgacaaggtgctgggaactgctgggcgaaatcatcggtgatgccgttcacgaaagcttaattgatcagctcttttcacaattttgtttaggtaaataaaagggaggaaaaaaccatggggtatgaagcaggccaatacgacgtgattgtcatcggcgccgggcatgccggtgttgaggctgccctcgcatccgcgcgccagggagccaaaacgcttgttttgacgattaatcttgatatggttgcgtttatgccatgtaatccgtctgtcggcggccccgcgaaagggattgtcgtccgcgaaattgacgcgctcggcggagaaatggctagaaatatagataaaactcatattcaaatgagaatgctgaatacaggaaaaggtccggccgtacgggcgctgcgtgcgcaggcggataaattccaatatcagcacgaaatgaagcatacgctggaaaaaacaccgaatttgacacttcttcaagggattgccgagcgtttaatcattgaagacggagagtgccgcggtgtcattacgcaaaccggtgctgaatacaaggcaaaaacggtcgtgctgacaaccggaacgtatttaagagggcggatcattctcggggatctgtcttactcaagcggtccgaataaccagcagccgtctattaaactttctgagcacttagaggagctcggttttgatctcgtccgttttaaaacgggcacgcctcctcgtgtctcaagcgattccattgattacagcaaaacagaaatccagccgggggacccggttccgcgcgctttctcatatgaaacggttgaatacattaccgatcagctgccttgctggctgacttacacgagtcctgagactcatgagatcatcgacagcaacctgcatcgttcgccgatgtattccggtatgattaaaggaacgggaccgagatactgcccttcgattgaagataaagtcgttcggtttaatgataaaccgcgccatcagattttccttgagccggaaggcagaaatacgcaggaagtatacgttcagggtctatccacgagtcttcctgaggacgtgcagcagcggatgctggcgaccattccgggactggaaaaggtgcagatgatgagagccggatacgcgattgagtatgacgcgattgtaccgacgcagctctggcctacactggagacgaaaaaaatccctaacctgtacacagccggtcaaattaacggtacatcaggttatgaggaagcagccgggcaaggaattatggcagggatcaacgcaggccgcaaagcgcttggaaaagaagaagtgatcctcagccgttccgatgcttatatcggtgtattgattgatgatttggtaacgaaaggaaccaatgaaccgtatcgtctgctgacttcacgggcggaatacagactgctgctccgtcacgacaacgcggatcttcgcctgacggaaatcggccatgagatcggcttaatttctgatgagcgctatgaagcgtttgagaagaaaaaagcggcgatcgaggcagagaaaaaacgtctctggtctgttattatcaagccgtctcctgagaatcaggaatatatccgttcactcggcggaagcgagctgaaagacggagtgcgcggcacagatttaatgaaacgtccggaaatgaactatgaaacagtgacaaaacttgcgcctgcagattctccggttccgcaagatgtggcggaacaagtggaaattcaggtgaaatatgaaggatatatcgaaaaatccttgcagcaagtggaaaagctgaagaaaatggaaaacaaaaaaatccctgatcggattgattatgacgccattaaaggaattgctactgaagcgcgtcaaaagctgaaagaagtgcgtcctttatcagttgctcaagcgtcccgtatttccggcgtcaatccggcagacatttcaatcctgctggtatacctggagcagggccgtattgccaaggtagctgaatagaaaggatgacggcatgaatatagagcaatttacatccagtttagcggagaaagggatttccctttctgaccgccagctggagcaattcgagttgtattaccggatgctcgtggaatggaacgaaaaaatgaatctgacatccatcactgagaaaaaggaagtttatctcaagcatttttatgattcgataacggcggcattttatattgattttgaaaaggtcaccactctttgtgacgtcggcgccggcgccggttttccaagcctgcccgtcaaaatctgcttcccgcatctgcatgtcaccatcgtcgattcactgaataagcggattacgtttttggaaactctctctgatgctttacaattagagcatacgacatttgtccatgacagagcggagacattcggacagcggaaagacgtccgggaaagcttcgatctcgtgacggcccgtgcggtggcgcgtctgtcggtcctgagtgagctttgtctgccgctggccaagaaaaacggtatttttgcggcattaaaagctgcagccgctgatgaagagctgaaagcggggcaaaaggcgattaaagtattgggaggagagcttgaacaagttcattcctttacacttcccgttgaagaaagtgaacggaacattatgatcattcgcaagacgaaaagcactccgaaaaaatatccgagaaaaccgggtactccaaataaatcgccaattgaagggtaatttagacagcctgatgtgacaattccatcatattttctgcaaaattgatgaagatacagcaggaaaaaccatgagaaaatagaattataaaaatggcagtttttaaaggtggtgtaggtacatgaagcattcattctctcgtttcttcgggtttggtgagaaggaagaggaaccggagatagctgagcatgatacaaacaaagaagagatactcgaaataccggtacatgctatcgttcccaaccgttttcagccacgcaccattttctcagatgaaaaaatcaaagagttagcaatgactatccatacacacggcatcattcagccgattgttgtcagacatacagaagatgaaggacaatatgagctcattgcgggtgaaaggcgctggagagcggtacagacgcttgaatgggagaagattcccgcaattattaaagatttttctgatacggaaacagcatctgtcgctttgattgaaaacctgcaaagggaagaattgtcctccattgaggaagctcatgcgtacgcaaggctgttagaacttcatgatttaacacaggaagccttggcgcagcgcttaggaaaaggccagtcaacgattgcgaacaagctccgattgttaaagctcccggaacccgtccaggatgcgattatggagaaaaaaattacggaacgtcatgcaagagcactgattccgctcaaacagccggagtttcaggtcacattgcttgcggaaatcattgagaaaagcttaaacgtcaagcagacagaagacagagtggtgaaaatgcttgaacagaataagcagaaaccaaagccgagacgcaaagcgttcagcagggatacaagaattgcgatgaatacgattcgtcagtcactgtccatggtggaagacagcggcgtcaggctgaacactgaagaagaagaattcgaagagtacatccagcttaccattcggatacctaaataaaaactctcctgatcagcaggggagtttttattttaatcaaaaaactattttgagataatgatagatttattgtgcactatacattatatatgtaaaattttatctttttgtgtcgtgaattgtctttttacagtcaaaaaagtcactttatcggagaacttatattagaaagtgtctttttcgtttacatttttttcacttgctgataaacaaattatgaaaaaaataaaacgctttactctttttttgataagatagaaacaagacagtacatgttcatgtgaaggtaggtgacatcgtgggaaaaatcatagcaattacgaaccaaaaaggcggagtcgggaagacgacgacttctgtcaatctgggggcttgcttggcttacataggtaaaagggttcttcttgttgatattgatccgcagggcaatgcaacgagcggattagggattgaaaaagccgatgtggatcattgtgtgtacgacattttagtagatgatgcagatgttacagatattattaaaccgacttcagtagagaacttagatgtcattccggccacgatccagcttgcgggagcggaaatcgaattggttccgacgatctcacgggaggtcaggctgaaaagagcattagaatctgtgaaacaaaattacgattacatgattattgattgtcctccgtctctcgggttattaacgattaatgcgcttaccgcttcagattcagtcgttatcccggttcagtgcgaatactacgctcttgaaggattgagtcaattattaaatacagttcggcttgtgcaaaaacatttaaataccgacttaatgatagaaggagtgcttctgacgatgcttgatgccagaacgaatctcggcattcaagtgatagaagaggtaaagaaatactttagagataaagtgtatcaaaccattattcctcgcaatgtccgtttaagtgaggcgccgagtcacggcaagccgatcatattatacgatccgcgttcgagaggtgcggaagtatatttagatttagcaaaggaagtggcagcgaatggctaaaggcgggctcggaaaagggattaacgcgttgtttaatcaggttgatttgtctgaagagacagtggaagaaattaaaatcagtgatttacgccccaatccttatcagccaagaaaacaatttgatgatgagtcattagctgaactgaaggaatccatcattcagcatggcattcttcagcccattatcgtgagaaaatcattgaagggctatgatattgtagccggcgaacgccgttaccgcgccgcaaaacttgccggtaaagagacagtgccggctatcgtgcgggatttatctgaatcgctgatgcgggaaatcgctcttttggaaaaccttcagcgtgaagacttatcaccgcttgaagaagctctggcatatgactcactgctgaagcatttggatttaacccaggaacagctcgctaaacggctcgggaaaagcaggcctcatattgccaaccatttaagactgctgacgctgccggaaagcatccagaacctcattgcagaaggtacgttatccatgggacacggcagaaccttgcttggcttgaaaaataaaaacaagcttgaaccgcttgtgaagaaagtggttgaagaacagctgaacgtccgccagcttgagcagctgattcagcagttaaacaacaatgttccacgtgaaacaaagaaaaaagaacctgttcaagatgttgtgttaaaagagcgggaatcgtatttgcaaaattacttcggaacaacagtcaatattaagagacaaaagaaaaaagggaagattgagattgagtttttctcaaatgaagatcttgaacgtatcctggaactattgtccgaaagagaagcgtaaaaaccatcttttttaaaaaagatggttttttatatacgtcttgtcagcttatgaaacggactgagccgttcctgccggccttctgatttatctgtcagctgtaacccctctgctaaaacatttgccatgctcataacaagatgaagcctcgtattctgcaggacaaaatactccataaacccgctgacattgacgattccattgatatggacgtcaccgatttcaggaaggtctttttgaacacctgctccgggcttcagcggcccatcgccgatttgaaatgagcctacgcttttgacgcggcctaaacaagcatcaaccgctataataaacggatttttatgtagatgttgaatatctttcagcttgtctttcatattgacggcgtgaacaggatctgacagcgtgccgtaaacgtgcaatctgcctaaattcattttttctaactttgttcctacgagcggacctaatgaatctccggtcgaccgatctgtaccgatacacacggtgactaacggtctgccggctgctttacgtaaagatgaagtaaggattgcttgtatttgattcgcagcagaagaatccgtatgggatacatattgttttgcccgttcttgagaaaaaagcccgccttttcgattcataaggttcacttccttgtcatgtcatacgagtattacattgttgtttttggtgatgtatggttgtttacagtatatccagcgctgcctttttttatgcttatgtcatgatgagcatgccggttgtttgaaaagagcggatagaaaaaagaactcagagcagttattctctaagttcatgaaagaaataagaccatatgatctacatcaacatattgctgatgatctaattccagcgctcttttttctgcagagaagaggataatcctaactgagcgcagagtttttttgcgggttccatttgttgaagtaacagagagatggagctgttctgtgtctttcatcttttttgcccggctgatggcttccgtcattaaagcttttcccgcgcctgaccctaggtgtttgggggaaatatacatagaaccgataaccgcaatgtgtcttagtttaaacagcagatgcttggagatcttgaggattcctatcaggctgtcttgttcaaaggcgccaagcaagatggcattgccggcttcaagcctggctttgcatttttcggacggcctcatagctgacggcgattgcgtccgggtgatcttttaaagctttgagcctgaatcggagtaaggctgggtatcacttgcggttaaacgcctgatgtccatgatttgagcgcctaacataaataaattttctgaatagtcaatcgtcgttatcataccatatttgtcccatttgtatgaatgtttgctgctgtcactcaatatagtagcaatatgcggagatgatcagaaattttatgaggtgatgagggtgtggagagccgggatgaagtggatgctgctcatattaagcagccagattggggccgggtatgcaagcgggcaggaaatatggcagtttttcggtgtcgaaagcggactggctattgtattgtttacagtcatgtttacgatttcggcttatattgtgttgaagatcagctatcgggttcaatcaacgcactttttacctgtgcttgagcatctgatgggaccggctcttgctaaagtctatgatgtgcttattatgttttatttgttttcaatgacgatggttatgattgccggcggcggtgtgacgctgcaaatgtacaagctgccgttttggatcggtatttttcttctttgcattgtgaccgtgggtttattcttttgggatataaaagggatattatctctgaatagtattttgataccgattcttgtagcggggctgttatatgcattggtcttttttcagacaacgcatcattacacgtggacgatagacttgacccgccagtataattggccggcaagcattaccttcacgtccttaaacattctttctgttgtcgctgttctttcttcaatcgggaaagatatgaagggactgggagaagccaaaatcgcaagcgttgcaagcgggctgattttcggtatgatttcatttgtttacaatgaaacgcttgtacagctttcaggcagtcttacacaatatgagattcctcttttcgccgtccttgaaggcgctccttatccgttatttctttgtatggccgccgtgctttttttagccatctatacgacaacggtgaccggtcttttcgggctgtccagccgcatgcttgcatttgtgaaattgccgagatggacgctcgtatctcttcttttagctgtgatggtgccttttacgacaatcggtttttcagatttgatcgccattttatatcccatttacgggcttttaagtctttatttgctggtatgtcttcttctttaccctattttagggagatggaaaaaagtataatgctcattttgagtgcggccgttgctcttatcctgtctttttttgtacaataaataaagcagtctatggagagaggtgaagggtcttggcggataaagactttggcctgaatgatattgttgaaatgaagaaaccgcatccttgcggtgaaaacaggtggaaaatcattcggatgggaatggatattcggatcaaatgcacgggttgttcccacagtgtcatgattccgagaagagattttgagagaaagctgaaaaaagtactcgtcaagcatgaggagcctacatcataagggctggcgctcatgctttttcatatagaggagaggaagaggcccgatgagcaaagtgcatcagtcagcgtgcccgctgaattgctgggacagctgcggctttttggtgacagttgaggatggaaaggtgacgaaagtagacggagacccgaatcatcccattacggaagggaaaatttgcggccggggcagaatgctggagacgaaaacgaatgcgccggaacggcttcgttttcctttaaaaaagaaagacggcgaatttgtccgcatttcctgggagcaggcgttagatgaaattgctgaaaaaatgacggtgattaaggagacgttgggcactgccgcagtgctgcacagtcatgactacgccaataacggtcttttgaaggcgctcgaccagcgttttttcaatggatacggcggtgtaaccgagattgcgggcagcatttgctggggttccggcattgaagcgcagcgctgggatttcgggcgttcttacgggcatggaccgcttgatatttatcacagcaagcatgtgatcgtatggggcagaaacgtgtcccggacgaatatgcacctctatcatcatctgcagcaggtgaagaaaaaaggagcgacactgacggtcattgaccctatttttaacccgactgcaaagcttgccgaccggtatatatccgtcaaacccggcatggatggctggcttgcggcgggtgttttaaaaatattatgccaaaccggcagaaccgattctgattttattcaaaagcattcggtcggttttgaggaaatagacaagcttctgcagacgatttcttttgaggagatcattgagaaaacagaaacgtctttagaagcgcttgaatatcttgccgatttatatgctgacggtcccgcctccacttttatgggtcttgggatgcagagatataaaaacgggggcgggacgatacggtggattgacgctttagctgcggcgagcggaaatgtcggtatcaaaggcggcggcgccaacttcggaaatgtgcaagtcggtgaaagctttgcaaaggccgagctcactcgtcctgatttgaagaaaagttcgagaacgttttcgatgatgactcaagctgaagaggcgctgaatgcagccgacccgccgattgagatgatcatcgtgacgtgcggcaatccgctgacacaggtgccgaatacaaaaaaagtgaaggaagcgtttgaaaaaacgccggtcacagtggccattgattcggtcatgaccgatacggcgaagctctgtgactatgtgctgccgacggccgttgttttcgaagaggaagatatttattattccagcatgtatcatcactatgttcaatatggtaagaagcttgcggaaccgcagggagaggcaaaatcagaccgctggatctggacggaactcgcaaagcgtctcggattcggggagctgtttgattacagtgcggaagatttcttaaaaatggggctctcttctttggagaaagaaggaatcacccttgagcaattaaaggaaaaaggacatatgccgcttccggttaaacaggttccgtggagtgattttcaatttttaaccccgagcggaaaatttgaattcgtctcgtcactggcagaagagaaaggatacagcggcctccctcaattggaagtgccggaggagtccgtttatcacgacgccggactggccgggaaatatccgtatacgctgctgtccattcacccgcagcgctccaatcattcacagcacgtgccgtttattgaaaagctccagcagattcaggtggacctgtcgccggatatcgccgaggagctttcacttcaagacggagatacggcagaggtatacaatgaccgcggccgtctgcgcggcagggtgaaaatcatgaagcaggctcacccgaagacggtgaatatagatgaaggcatgtgggcggcattcggaggctccgtcaacatgctcacaaaggattcaaattccgataatggaatgggaagtacgctttttgactgtctggtagcggttaaaaaagggtaatctaaggagagagagggcgggaaatgcttttttctcagcttgtcttttcctatgaacctccttataattgctctaggtttacaatacgtttatacgatgatggtttgatatagaggagatgaaagaatggctttaactgctggaattgtcggtttgccgaatgtcggaaaatcgacgttatttaatgcaattacccaggctggtgccgaatcagccaactacccgttctgtacaattgatccgaacgtgggaatcgtggaagtgccggatgaacgtctgcaaaagctgactgaattggtgaacccgaaaaaaacagtgccgactgcgtttgaattcactgatatcgcggggatcgtaaaaggcgcatctaaaggtgaaggactcggaaataagtttctttctcatatccgtcaggttgatgcgatctgccacgttgtacgtgcattcgctgatgacaatattacgcacgtgtcagggaaagtcgatccgattgacgatattgaaacgatcaatcttgaattgattcttgccgacatggagacagtcgaaaaacgcatcacgcgtgtaagcaagcttgcgaagcaaaaagacaaagaagcggtttttgaatttgacattctgtctaaattgaaagaagctttcgaacaagaaaagcctgcccgttccgttgaatttacggaagaacagcaaaagcttgtgaagcagcttcatttgcttacgtcaaaacccgtgctttatgtggcgaatgtaagcgaagatgaagtggctgatccttcagacaatgaatacgttgcgaaaatccgtgagtacgccgcgggtgaaaatgccgaagttatcgtcgtctgtgcgaaaattgagtctgaaattgctgaattggaaggcgaagaaaagcaaatgttccttgaggagctcggcatcgaagaatcaggtcttgatcagctgattaaagcgtcatactctcttctcggccttgcgacatactttacggcgggcgaacaggaagtgcgcgcatggacattcagaaaaggcatgaaagctcctgagtgtgcgggtatcatccacactgactttgaacgcggctttatccgcgctgaaacggttgcttatgaagaccttttggcaggcggcggaatgtccggagcgaaagaagccggaaaagtgcgtctggaaggtaaggaatatgtagtccaagacggagatgtcattcatttccgatttaatgtataggacacagttgtaaagggacaagagctttggtataatataaacttgtgagtaatagaattattgctccttgcccattatagggccgcttagaccaaaaggaggtgcaaacagatgaaaaagtacgaagttatgtacattatccgtccgaacattgacgaagagtcaaagaaggcagttatcgagcgtttcaacaacgtattgacttctaacggagcggagatcactggaacaaaagattggggtaaacgtcgtcttgcttacgaaatcaacgatttccgtgacggtttctaccaaatcttaaacgttcagtctgaagctgcagcggttgctgaattcgaccgtttagctaagatcagtgacgatatcattcgccacatcgttgttaaagaagaagaataagcaatttgaaatatataatgttaaaaggtggtctttcatatgcttaaccgagttgtattagtcggaagactgacaaaagacccagagcttcgttatacgccaagcggtgcggctgtcgccacgtttactcttgctgtgaatcgtacattcacgaaccagtccggagaacgtgaagccgatttcattaattgtgtcacttggagaagacaagccgaaaacgttgcaaactttcttaaaaaaggaagccttgccggcgtagacggccgactccagacaagaaattatgaaaatcagcagggacagcgtgtcttcgtgacagaagtccaagctgaaagtgttcaatttcttgagcctaaaaacagcggcggttctggatcaggcggatacaacgaaggaaacagcggcggaggccaatactttggcggaggccaaaatgataatccgttcggcggaaatcagaacaaccagagacgaaatcaagggaacagctttaatgatgatccatttgccaacgacggcaagccgattgacatctcggatgatgatcttccgttctaatagattatcgctatattcataacgagaaaggtgggaaatgacaatggcaggaggacgcagaggcggtcgtgcgaaacgccgtaaggtttgttacttcacttctaacggcattacgcacatcgattacaaagatgtagatcttcttagaaagtttgtttctgagcgtggtaaaatcttacctcgccgtgtaactggaacaaacgcgaaataccaacgtaaattgactatcgcgatcaaacgcgcacgtcaaatggctttacttccatacgtaactggcgagtaagccgaaagaaaagagcaagagcctgcgggctcctgctctttttttatatcagtcctcctccatcctgccgaaatgtttcacatgaaacatggaagtgctcctgacatctatctttgttatcttgctcctctattcaaatacgcgtacttatgcaatgaatttgtttatactgaagaacagggggtggctgagatggagacagacagaaatatcctgactgatgaaaagtggagcgcaatcatacgcaatgatgcttcttatgacggggcattttattatgcagtaaagacgacggggattttctgccggccttcttgtaaatcgagagctccgaataaagaaaacgtgctggtgtttgatacggctgatgcagcgcttgataaacattttcgtccctgtaaaaggtgccggccgaacggtcttcgtcttcctgatgaagaatggattgctcaaatcattgagtacattgaccgccattatcacgaatctctgactctgagtgtactggccgaaatgtgtcacggcagcccttatcatttacagcggacatttaaaaaaatcaggggaatatccccgattgagtatatacagaacataagattggcgaaggcggaacaccttttaaagcatactgatatgacagtcatggagattgctctgacggtcggaattccaaacacagcgcattttgccactctttttaaaaagagaaccgggaattcgcccacagaataccgaaaaactgccggaatgggacagggaggttcaatatgagtaaagagacaatggtctattggacacttttcacacggaatgattggagcctgtatacagccgccacatctaaagggctttgctttataggttcaaatcatggaagctttgaagagcttgagcagtgggcaaaaaaatcactgccgcaataccgattggcacgtgatgatgagaagctggcgtcttacacggcagagctgtccgagtacatcgaaaatggcagatcagctttttcagtgccggtggatctttacgggacagaatttcagcttgctgtatggaaagcgcttatggacataccgtacggcgagacatactcctattcggatatagcagaaatgattcagaaaccggcagccgtaagagccgtgggcgccgcaatcgggaaaaatccggtattgattacggttccgtgccatcgcgtcatcggaaaaaacggaaaactgaccggattcagaggcggtttagaaatgaaaaagcagatgctggcattagagggcggaaacattgaaacactggaatgccggctgagccggacaggggggaacacatgaaactgatttcttggaatgtaaacggcttacgtgccgtgatgaaaaagatagatatcaatacttacgttcaggaaacgaaagccgatattttatgtctgcaagaaacgaaagtacaggacggacaagtatcattacagcttgaagggtatcatgactattggaactacgcggtgaaaaaaggctactcaggcacggctgttttttcgaaagaaaagccgcttcacgtgttttatggactgggaattgacgatcatgatcaagaaggacgggtgatcacacttgaatttgagaacctgttcgtcgtcaactgttatacgccgaatgccaaacgcggattagagcgaattgattaccgtcttcaatgggaagccgattttaaggagtatctgcagaagcttgaccggaagaagcccgtgatattatgcggcgatctgaatgtcgcacacagggagatagatttaaaaaatccgaaagccaaccggaagaacgccggtttctcggatcaggagcgggaagcgttcagcgccctgctgaacaccggatttaccgactcattccgctatttatatcctgatcgggaaggcgcctattcctggtggtcttacaggacgaacgcacgtgagaaaaacatcggctggcggcttgattacgtcattgtttcagacagactgaagccgcggatcagcgaagcggccatttgcgccgatatcatgggttctgaccattgccctgttgaaatgacagtggatttatgatgagatagcagtaagagaaatccactcttgctgcttttttatcaccaaaaatggaggagcacatggcaaatataaaagagattgcgaaactggcgaatgtgtcggtggctaccgtatcacgcgtattaaaccgacacccgtacgtatctgaggagaaaaggcgtcttgtgaatcaagtgatgaaggagatggattatacccctaatcgaaccgccattgatctgattcgaggaaagaccaatacaatcggcgtgattttgccgtacagcgaccatccctgctttgacaaaattgtaaacggtatcacgaaggaagcgtttgcccatgattacgtgacaacccttctccccaccaactatgaccccgctatagagatgacctatttcgaactgctgaaaatgaaaaagattgacggactgattgtcacgtcccgcgcgaatgaatgggaaaccgctgtgccttatctggagtacggtcccattgtcgcttgtgaatatacgcagcatcaagagattccctgcgcttataatgacaggcaggcagcttacagagaaagctttttgtatttgaaaaaccgcgggcatcaagatgttgcttttacatgtgtgcgggaagcggaaaaaagcccgagtacggccgacaaggtaaccgcatataaggcggttttcggctctcttgatgaaacccgcattctgatcggatgccatgatatggacgacggaaagcgggcaggtgaacacttctggggtttccacaaggcgccgacggccatctatgcgcacagtgatgatgtggctgccggcttgtaccagtttgcgaaagaacagaaatgggacgcggagatcatcggcgagggaaacctgagcgtcagccgggcattgaatatcccatctctggaacttcatttggaacgggtcggaagggaagcatttttgctgtttttgcacggagaaacggctaaaaaacaaattatgcatcaatttcagcggaaaaagtcttgagctgaaatgggtttcatgctttataactagattgagaaaaaaaaaggaggcggacatatgcgaattgaacatgcggccatatgggtgaaagatttagaacggatgaaagaattttatgagaaatacttcggcgccaaggccaatgacctttatcataatgagaaaaaagatttcaaatcgtattttctttcgtttgactccggatgcaggctggaacttatgaaaaaaggcggcattgatgaagctccgtcacagaatatgaccggatgggcgcatctcgcattttctacaggcagcaaggagcgggtgaatgaattgacggagacgtttaaaaatgacggatttcaggttgtaagcggcccgcgcgtgacgggtgacggatattatgagagcgtgatagaggatggggaaggcaatttgatagaaatcacagtgtaacagtgcgggggaacccgcactgttttattgattaaatttgctgagcattagttttcggaccgaatagaattaacaaaacggaacatagaagccagcagccgccgatgaacaaaaagacgctgatgtagccgagcttaacggcaataaatccgacgagcagggatccgaatatattggaaaaacggccgagcccgtatgccagcccgctcccggccgagcgatattccgtaggatacggctccgatgtatatgcgtataagtttgaggtgaaaacccgttccgtgacattgacgacaaatccaaacacaataatcatgacgggaataaacgtcatgccgtataacagtccggcaatggcagtcagaaaagcgcttgcggccagaatccattttctttggaacgtctcggatatcatggaaccgagcaatgcgccaagcggtgcgccgacagagtgaagcacattgtaccacagcgttttttccatggtgatgccgttgcttttcagcaggctgggcacccatgaagcaaagccgtaaaagccaaaggtttcaagaatccataccgctgacaggatgatggtgatctttaaattcctgccctgaaacagccctaagtagcctgcgtgcttcactgtatgtacttctgccgcctcttttggcgcgggaagcgggcctttttctttctctatacgtgcttcaagacggttcataatggcgtttgcctgatcatatgcgccccgattttcgtgccagcgcggcgattcctcaagccggcggataaaaaagaaataaatgagaccggccgccccccatacgaatacgagccgccacccccatgagcctaaaggaatgacaaaagcggaaacaacgtttgtgacgggaacgccgatcagtccgatcatggcgcaaaaggagatgtattttcctcgtacggatgatggaaaaaattccgccaaatagctgttcgtcacaatcatggcggccgcgacgccgagcccggtcaagaagcggaaaatcattaaggacggaatgtcccatgccagcgcattcagaaaagatgagatcgaaaagacaaggacaaaacaattcagcgcttttttcctgccgatccgatcggacagtcttccgccgatggaggcgcctaaaaacatgcccaggaaggatgcggctgtgacgtcggcaatgacggacagcttcacgccccaatgctcaatcagcgccggagccacgttgctgagcgtaaacagatcagcgagatcgaaaaaatagatgattccgagagcggttaatacttgatagtgcacacgcgaaatggggagacggtctaatcggttcgctacatttgagaatgtctgatgtttcataaaaaaccccctgacttagcaattgtaatcagaaaatactgtaaatttatctgacgaatacattataaaggtctttttttggcaaaaacagagtgtaaataaccagagccaaaggaaacggcatagcgctttcttcttaaaatatataacatttcctatatctgtttctgtttatattgtaaaatgttgaaggaaaggaagttgatgcataaatatgaatacatttgtacggcccgcagagggaagaaatagtgtatcgagatatcttctttctctgttgctcattgtgggtttgttctttttcggaagcatactgaccgtgttttatatgtttctcacgtccgctttcaatccttcactgacgataaattgggatgaggcggcattaagtgacccgctggcggatatttatttacagcatatcgtctatttcatagcgattccgggcatttggatagcggttcgtttcattatgaagcggcggtttttatccatcattacaccgaatcagtcgctgaactggaagagaattttctttggattcggcacatatgttgtgctgatgtttgtcgcggggctgattgattttttaattcatccggatcgtttcacgcttcaggaattccatgcttcacgttttctgctgctgttagcggcggccgtcttgttggtgccgattcaaacctctgcggaggaatttctctttcgcggttttctgcttcagtttgccggaaaattgacggcaaacgcggtggttctgacggtcattatcggcggattattcggcgcacttcatttcggaaatccggagatggaaaatggagctctctgggcgggaatcggatatgttaccatcggcatgatctggacctttatcacgattaaaacgggcagtctggagatgtcccttggcggtcacgctgccaataatatgtttttatttatctttctcacagaggatcattcggtatacggcggcattccgtcgatatttacaacagcagccggcggctatgaaatatacgattgcatatcgactctggtgatcaacatcatcttcgcatggctcgcattccgttttgtgaaaaaagaaaagcagcaggccgcctaggctctgctgctgatttgtaaggtgttcatcgcttcatcaatatccgtcgtcggcctccggcaggcgaaattctcacaaatgtagaccgttgtcttcccatcgatcatttgataacccgcggcaaagtcagaaatgccggcaagctcatccggatgttctgcggcgagaatcgtataggcgggagtgaaatgctcctgaagcgcctcaatgaaacgttttctgtccgggtcatctttccttccgaacacaacgatttctttttggggcattgtgtgtgccagtacgctttgcatgaagaaagcgctgctgctcggataggcctctatttcccgtttgaacacggaaaacatcgcttcggctttttcaatcagtgatacatcacccgtcaggcggccgagacgaagcaactgtacggcagccgcgctgtttccggaaggcacggctccgtcataaacctctttttccctgacaagaagagtctcggcatcattccccgtaaagaaaaaacctccgtgccgttcatcccagaacagctccagcatgcttgtacataacgttttcgctttctgcagataagacggatgaaaacccgcttcatacaattcaaggtaagcccagatgagaaaagcgtaatcatcgataaaccctttgtttttcacttcgccctcgcggtatcggaccatgacgcgcccgtccggcatgaggtgacgttcgagaaagcggatcgctgtttccgccatgctgagaaagtcaggctcgtgaaatacctttgcggcttttgccagcccggcaatcatgagcgcgttccatgaggtcagcactttgtcatctgtatgcggatagcttctgttttcacgcgcttccagcaattttgttcttgcctcttcaaggcgttcggccagctcatgtccggtgaggccggtctcttcgaggatggcctcacgccgcgtgaaaatgaggtgcgggatgttttcgccttcaaaattgccttgatctgtgatgttatacaccttgcaataaagcgggccgagttcatcaccgagaagattcatgatttcttttttggaccatatgtaatatttcccctcacggccttcggtatcagcatctaaagctgagaaaaagctgccgtcttcatgcatcatttcccgctgaataaacgttacgatctgcatcgcaatctgtttgtagcgctcattacccgtgacttgataggcttccgtataggcggtcaggagaagggcgttgtcatacagcattttctcaaaatgcggcacgagccattcattatcagtcgagtagcgggcgaatccgaacccgatgtgatcaaaaattccgccgttcgccatgccgtcgagtgtcttggttacgccggccaaagcctgttccttgcccgtatagctgtagtagcgaagcagaaacatgagcatatgcggcatcggaaatttcggagcctggccgaacccgccgtacaccgtgtcaaacccgccggccagctggcgatacgtgtcatgaaccgcctgttcgccaagcatgccctcagccgggtgaatcttgacttcaagatgagcggcggcgttttcggcgatatcctcgacatgctgccggtcattcgcaaacgtttcggacagatgttcaagcacatcaataaagcccggacggttaaatttgctcgtcttcggaaaatacgtccccgcataaaacggcttctgatctggtgtgacgaacacgttcagcggccacccgccctgccccgtcatcagctggcagattctcatatacacggaatccacatcaggccgctcttcacgatcaaccttgatggctatgaatttatcgtttaacataccggcgatctcttcgtcctcaaaggactcgtgagccattacatggcaccaatgacaagtcgaatagccgatgctgacaagaaccggcttgttttcgcgttttgctttttcgaaggcttcttctccccaagggtgccagtttacggggttgtgggcgtgttgaagtaaatatggagatttctcagcgattaatctattgggtgtactgttatttggcattggatcaccttctttcacttttaaattggttgctatttttactttaccataatggagtttagtttataccttattagattaactagattagattttatctactcgtctaaggaacaccagtcattttgcgcacaatttttttgcaaaataaagacttataaacatttgctgtttcttgtaaagtggtaactaataaagaaataatgaaacaaacgatagaggtttagtacaaatttataagacgttgattatttatacaggaggagagaattaacaatggcatatttatatttattgctcgcaatttttggtgaacttattggttcctctatgctcaaggccgcagaaggcttcacgaaactttaccctactattggtgcaattattgcttttataggttcctttttcttcttatcacttgcaatgaagtccatacctttgaataccgcctatgcagtttggtctggtgtagggactattgctactacaataatttcgattttgatttggaaagaaaaaattaacattgccagtgttactgggattgttttgatacttgtaggagttgtaatattaaatctttttggacctggtcatggtgaagcacatagtgttgaaaacgcaagcgcaacaacaaacaatgaaaaaataattgagtagtgaactgtttgatagtgaagtctataaaacctcacttttttatttatagtcatataatatttgaatgtcatcatctttcatgaaaagtaaagtctcttcgtttttaagttgttcaattgcttcattgactgtttgatccaatttagatttgggtctgtccttttcttctctaccgaccaaaaaatcagtggatacatcatataaatcagcgagtttctttaatgtctccggatcgggcgatctataatccctttcgtaattagacaatgtctaccctgttaatccaattttctctgctggcacgtcttgattagagtaaccggatttttttcgagcccattttaatctttggcctaatgtcatttgttatcatccattccacaaagagttgattaattattataatatcagcaattgctgaccctttcataaagtagaacaaaaaggcgaacattaacctttgactctccgaatcggagggttaaacttaatctgtagttttattcattttgttgtctcgtccatactttcgtaaaaattctccgaaggcatcttgaagcacaaaaaagctctgactaattaatttagtcagagcttttttttatgaagtattcccgagtatctgtccttgtttttttaggcaatactacgtccaattctttatttaaccatgcgagcgttttattacgaagataattacgcatctgttcttctgcttcaagcattaccaagttaattgtacaagaagaattgctggattcacaagagttgcatttgtctcgataaagtagaccattgcttacaatatttttacattggaaaatgggttttggtccttcaacagcctctattacatcccaaaaggaaatatcctccggggattttgctaacctatatcctccctttacaccagggacagaatttacaataccagctttagataatttaccgaaaacttttgaaagaaatgtttctgaaagtccttggaactctgcaaggtcccgaatcccgacactttccttggagggaacatctattaaataaaccagacaatgtaaagcatattcaaccccaacactgtactgcatataaactcacctgcttttgattttaaggtttatcacattgtatcttaggagtatttttgatgatagtcaatcttaaaacccttcttcagatactatttgttccgtttgacaaaataaaatacaaggtttatattagtgaccaagttaatcgtcgattaatatagtctttaatataaaatgaaaggagagtttcaaatgagcaaaacacttatcattaacgcacatccaaaagtagatgatacgtcatcatacagtctacgggtaatgaaccactttttagaggcttacaaagaattaattccagagagtgaagagcttgagcaaattaacttatatagtgatgatgtgcctatgattgataaaacagttttaagtgcatgggataaggcagaaaaatgcgaagaactgacaagcgatgaacaaaaagtaacaggacgcatgacagaagtattgaaacaattcaaaagtgcaaaaacgtatgtcattgttttgcctttgcataatttcaatattccatcaaaattaaaagactatatggacaatattatgatcgcacgtgaaacatttagatatactgacactgggtcagtaggtctgcttaaagatggacgaagaatgcttgtcatacaagctagcggatcaatttatacaaatgatgactggtatgaagaagttgaatactcaaataaatatctgaaatcaatgttcaatttcctcggtattgaggattatcaaattatccgagtgcaaggaacagctttactgagtccggaggatgttttacaaaaagcaaataaagaagttgaagaagctgcttcaagattggcaggtaaataaggtatagcatgaagatcattgttgctgggggactgcagtaattggtcggtcccttcttcctaaattaatacaaaacggccatcaagtatttgcattgacccgaggtaaccggtcgaacacgttcctcaaaagaataggggtaactcctgtaaaagcagatgcaatggatcgagatgctgttcttaatgcttttaggaaaatttaacctgaggttgttgtccatcagtttacctctttaacaggttacaatcttgaagaaaaagcgagaatcagaattataggtgcgcgaaatactgttgatgcgtgtcatgaaattggagtgaagaggataattgctcaaagtctttcttttgcttatgaacccggattaatacctgccaatgaagacgtccctttagatctcgacgcaccaaatccaaggaaaataaatgtaattggagtggcatcattagaatcagcagttgctgaattacccgatttagtaaacaacattaaaacattgcaagaaaatgggttgaacaatatctcatttgaagtaaatcatgacacgttagagcatctttccagcgtgtttttttatttgtgaaaatgaaaaacctgtcaagaaacaaaagacatacaataatcgcaataaaaacgaaaagaataatttaatcaatagacactttgtacctttttacattttaactttgtcaataaatgttcaatctgccatgtaaattttcaaaattctttacgggagtgggggaatttgcttgcaacaagttttcttgaacaaaggtaacgcccacaaccccgtaaactggcacccttggggagaagaagccttcgaaacccaagtattaaaaaggagaactgcttatgactctattttcagggttaaatgtcatctgctttattgctttttagataagaaataaggatttaaaatctttatctttttatttactgttagataggtgaaacacaccccggcgactgtaaccatcccgcctgtcagtgcaataaacgcaggtacttcacctaaccacacccaagaaatagccaaggctacggctggtgttaaataaagtgaaatggctgcttctgaagcaccgacgagtgaagtgacatacgcaagtgcaaagtaaggcacaaccgttggtaataagcctaagtaaacgacagaccatgtggaattcatcgatgcgtgaacaacttctccccataaccccggaagaaataccagcattggcaatgtcccgccccaaatagtgaatgtaacgaatgggataaatccatatttttttatatagcgggcttgaaaaacgaaataaatactctccgaaaaagctgccagcaagattaacaaaatgccgttcactgaatttgtatagtttcctgccccaaatgaaatgatcgatacacccaataaactaatgatagagccgacccatttataaaaaccgaaatgttcaccaaaaaacagacgggataacattgcagaaaaaataggtgtcatggtcacgagtaagcttgctacccctgcgctgacgtttttttctccgatattcagcaaaatgtgatatagtgcaaaacctaaaaatcctaacgataaaatagcagggatatccttcatgtcaggcaaacgcatatgagtcaaaacagcaaaaaccaccaatgccattgacccaatcaacaagcgaaacaaagcgaggtgttccggcgtgtaactctccaaactcgcgcgaattcccgggaaagctgatgcccacaacccaatcatcagactgtaagctatgccgattcgaactgttttctttctcatctttctcactcctctttacaaaaaccaaccagttatttaatgtttttctatattaataaagatttgatgagatgacttcaaccagttaaatagattttgacccaaccactttaaggaggacccttttaatgagcgctccagaagaaaaaaagatgagaaagcttcctaagtacatacaaatcattcaatttataaaagagaaaataggaaatggagaatggccgatcggaagtaagattccaagccagcgcacgcttgccaaacactttgaggtgaacaggagcacagtcattacagctttagaggaattgacggcggatggattaatcgaaggcagaatgggcaaagggacagttgttacgaacaatacatggacacttttggctaagaattccgctcccgattgggatcagtatgtaacctccggaattcagcagccaagccaaaaaatcgttcaagagatcaataaatcagaatcaaattctgatcttatacagctcagtaaaggagaactttcacatgagatttttcctttagctgttatgaaagagatcatgggaaaggtatcccaaaacatagaggcattcggatatgaggaaccaaaaggatatttgcctttgagagaggcattaagcggctatttaagaacaatcggcattcaagcttctccttcttccattcttattgtttcgggcgcactgcaagccttacagcttatatcaatggggcttttacaaaggggatcgaccgtttatcttgatcagccttcctatctttattcattacacgtatttcaatcagccggtatgaagctgactggagttcctatggatcatgatggacttttgccggaacatatccgcatggcaaggggagaacgggggagggctatcttatatacaaatccttgttttcataatccgacaggtattttaatgtcaaaaaagagacgagaagaaatccttgcggcaagtgagaatacacagcttcccattattgaagatgacatttatcgtgagttatggatagatgagattcccccggatcctattaaaacaatagataaaaatgggcatgtgctttacataggcagtttatcgaaaacattaagtccgggcttgaggattggctggattgtcgggccggaaccagtgattgaacgtttatccgacataaaaatgcaaacagattacggctccagttcgttatcccagagagtagcggcagagtggtttatatccggtgaataccagcagcatctagaacaggtgagaagtcaattaaaggtgagaagagaattggccttgagtgttttagaaactcatttgaaagatgtggcgacatggaatatcccaaagggaggattctttgtctgggtaaaaatattgccttccatatccgtgaaattactttataccaaagccttatcaaaagggattctgctcaatctcggcaggatctatgctgaggaaaaagggagttatattcgcttatcatatgcttatgcatctcttgaagaccttcaaaagggaatttatgaattgggtttgatgattaaggaattggcaagcagataaatttatcataattactttaatagaaagagacatgacaccaatgacacgcggattgttcgctgactacggttggggtgctggttaaaaaatacttaggagaacttgatattcaaagagctgtaagagagagattatctttaaaaccgtcactagcagaagtcttcaaaattatttaagttaatataccggtctttattgagatttgttttaaatatgcatttgaaggtcaattttatgatgactaagaactaagaattacactactttataaccgtaatttattaatgaaatatttcctgaaaaactttgatttttaattgcagattgatataataggtttgttattcttggccaaggatgagaatatttacaaatcttcaaaaagtggtgttagcaattaaaaaacctcatattttattatttatattaatttttacattaggtttttttgcgtgctttttattcatttttaagcatatagagagaaatgaaacagaaaaaattaatcataaccgtgtacaagaagtaccatggggagtgaaaaaaatcaatgctgcttcaatatggactttaagagagaaacagaaagtgaaagttgctatattagacagtggtattgataaagagcataaagatttaaaagggaaaattaaaggggaatttaatccaataaacatgactttaacctcagatgatgatgtggggcatggaactgctattgcaggcattatagcagctaaagataatagctttggattagttggaattgctccagacactgagatatattcagttaaagtactaaattcagaaggaaaaggttcgctagatacccttgttaaaggtatagagtggtgtattgataataatattcaggtaataaatttgagttttggattaaccaaagataaaccgttgttaagaggtgcaattgataaagcagtaaacagtgggatcataatcgttgcagccgcaggtaacaattatggcggggatgttgattatccagcagcttatgaaaaagttctctctattaatgctgtagatagaaataataaactagctaacttttcacctaaaggaaagattgacttttctgcacctggtgtagatataccgatactatccctcaataatggatataaaactgaaagtggtacatctttagcagctgcacatgttaccggagtaatatcattaattttacaaaatagagataaattcggaattgattcaaaagaggatatttataatcaagttaaccgtgtattgtccaaattgtccatcgatcttggaaagaaagggagagatgaaatttatggaaaaggatttttatcttttaagtaaaggggctaatttcaatgaaatgttttaaaaagagtattgctgtttttttaagtctaatattaacttttacttttattttacataatgaatcaaaagctgaggctataaacaataggtattaccaaattgtaacaaatgatgaagagaaattagtaatcacagcagaaaaaggcggagttaaaggtttaatgactttagataaagaaaatatgaaactttcattaataaccgatgaaacttctcagaagactggagaaaaaggtaaagaatataaagttgatattgaaaatgctacaaatgagaagatagaagcaacttttactgatacggaaacaaataaaaagtatgagattaattcagatgaggtaacagcttcttttgtttggtttatacctataggaatagttattggagaggcacttttagcgcatttaatttcaattggattagctgtgactatttcaggagtgacttatgttgcctattctgagtttaagaagcgtaaaagaacctattctcattatatggcagtaagaaagtctaaaggattatttatcggtaatggtttgaaaagacctgctgcaattgcacgccttaaaaggggtgatgacacttggtctacgtcgaagaacaatgccaaatctattgctaaagccgcaagtccgattaaaaaaattgttggtccggagatagataaaaagggtaaaggtaaacattatcattatcactcgatctctaggtataaacatggaaaaggtgtccgtatgaaagctcatgctttctatggggcagcaagataatttagattaatttataaacacctaactttaaagtaattaaaagataggaaattataataggagaaggaggtaactatgttaattattgatcacaacccaaaggatcagctgtattcagagttaattgatttggctttcgagatttgcgacgaatttcatttagttttaagaaaagatatgggatctttaaaatcattcgatcctctgttaaaaaaacttgaaagttcgttaaaagtaatgaaagagcaatcagaatgggccagtaccattctaggagacaatcaaaaagcaaaagtttattactattatacagatgaaaacgcaaaaaacattctgaaagaatccgcaaattctttatattcttgggagcagccacatttaccagaagacttgtctttttttaaagatggaaaggagtggttggtaacatgctctcatgaagaagaaagttatatcgatactgaagatgataaagaaatacaaagaatattgagtataccaggattaaaagtgcattttgaaagatgggattaaaatcattcaattttttataaaaaaattgaatgattttagtgaataatatatataagtaaggaaaccgtatagaatggtttccttacttattaaaccaacattactcaattgggatttttcttgtttatttcttgactaatacatattgtttatcttccaaatagaatatatgactaaggtgatttatatctttaaactttatatgttttccaaattgtaaagtatttaaattgataactacacccatgctttcatctttatcttcatcttcatatccatctaagcaggaatatatttcaattgattcaccttttgacaagtgtttttcaatgaaaagaaaaagtgatttaatagatttacgttggccaggtgtattgttggcatgtaagtacccttgtaattcatatatataaggatgtgtgaatttgtttctgactgcttcatatccaggatctaaatgaacaatatcaattccgtatgcatcttcttctgtgtcataaacctttacaagtgaattttcactgttctttcgattgtttttaaattgagagcgtttgttgacatctccttttatttttagttcagaaatgggcttaagtgtaggattactgccatactcaccaataggaagttctttatccgccccaataaaatgatgtaaagtcaatctatttcctcctttatcttatacaactaaaaatactcaatctgactttggataatgagatcttttttgtgtgtctatgataccccgtgtttcttgcctcatcaaggcttgataatgtttgaaggctgaagatggatgatgtgactgatttttaggctccttagggaaagaggaaccgaattaatttaatttaattgttatattgttgacgcatactccatcaatgtccatttagatggtatttttacagctgcagatttttcttcgactatttctaatgttctttcaagttgattatatatgtatccggaaaattaagtataccgtttgaccaatttcagcgttatgaagatttcgttgccagaataccaacaattgaagataaattgaagcagaatagtattaattctaaaaagtgcgggcgcattatggggagaggggaatcttacacacttatctgcagcttcacccacatactttgtgaaagctccaacagcttcttcgcattctgcaagacaacaactattccgttgctttttaacattttcacattacaggattcaggataaaaaagccgccaacagggcggcttttcttaagttaatataccaaatatatatcaaacttcaatctgtatagctatgtctttcctaaaaaaccatcggcttggttcttgaagagtaaatcatttaacccaaagcactattactcctgcagatgaaatttagattattgggctgtatagccgccatccattacgacggcctgccctgtaactccattagctttgtcactggcgaggaatactgcgtaatcagcgatttcttgcacggctaacaaacgtttttgaggaaccaaggggtaaatgacttcttcaaacaccttttctatagaaatgcctctagtctctgcaatatcttgtaactggttttgtaccaatggagtgtcgatatatcccggacacaaggcattgacagtaattccgtattccgctccttctaatgctgatactttagttaaaccgatcaaaccgtgtttagcgctgcaataagctgctttccctgcaaaaccaattaaaccatttatggaagccatattgatgatgcggccaaatttttgttttttcatcaaagggaacgctctttttgtcgcactaaaaggagcagtaatcattaatttcagcataaattcaaatttatcagtcgggaagttttctatatcagacacatgctgaatccccgcattgtttaccagaatatccattcgcccaaaggtttcaagtgtcttagagaaacttttttcaacttgttcttcgtttgttacatcacaaaccgcaggcaggacttcatatccttgtcccttaagttcctcagctgcatgatgcacggctttttcgttcaaatcggaaattaccacttttgcgccttctttagcgaattcacgtgcaatttctaaaccaattccgctagccgcgcctgtcacaagagcaactttactttctaataatttactcatagtaacccctccaggaaacattttggtctcctaaaagtttacacccggcagttgtataagtaaaatgaataaaaagaatataatgtattcgttaaactcatgaaatggagatcatacgatggatatacgccaaatcacatactttcttgaagttgctaaatccaacagttttactaaggcatcagaaaatctgcatttgtcacagcctgccttaagtaagatggttaaaagtttggaagaggaattaaaggttgatctcattgatcgatccgctagacaaatcgctttgacagatgcgggcgaaattgtatttgagcaaggccaaatgattatgaagtcattagatgacttgtcgacgaacttatacgatcttttgcatttaaaaaaaggaaaagtgaaaattggaataccgccgctgatcggtgtcttgttttttcctaaaatcattagagggtttaaacaattgtatcctgatgtgaacatcaagctgatagaacatggaggaaacaaggtgaaaaaggaggttgaagatggagtactggatcttggcgtggttattgaaccagtggacaaagagcagtttgatatcattccattgcttaatgaagaactgatgctcttcgttcattccgctcacccgcttgttcataaagagattgtggaaatgcaagacttgaaaaatgaacctttcatcctgtttagtgaagacttttctcttcacgatcggattattcaggagtgtattagagccggttttcgtccaaatattgtttatgaaagttctcaatgggattttatcagcgaaatgattggagaagaactaggtatttccattttccctcagtcgatagtgaaaaagactgatcaaagtttagttaaggcaatctccattgtcaatccatccattccttggaaagtggcgattattttaaaaaaaggaaaatacgtttcacacgcagtacgcgaatttatccggtatatttcatctttttgtaagagtaattacgtagactaagatcactcatgaaaaaaatgaatggtttttatagtttttatgtattttacggttagagagggctgcgatatattatcttatgtcaggaaataagtacctttcaggaggaatttcaaatggatcaaagccgttaccagcaaggtttagacaaattaatggagtacactttaacaaacgatgataaaatttctacgcatttaaagatttctgaagacttgaaagatatcgctccagatgtaagtaagtacattatagaatttgcttacggagatatatattcacgaccgggattaaccaatcaacaacgtgcgcttgttaccatttcatcccttgtaacgcaaggaaccgagccgcagcttgaacttcatatcaatacagggcttacatccggattaacaccgactgagattgtagagagtatcacccaattggttccttatacaggcttcccgcgtgtacttaatgctctttcagtagctaagaaggtgtttgcacagcggcatgtagaaagccattgagaaataaagagcttgtatggaatgcgggatgaagtagtataaactcatcaatagaatatacacaaaacgacagcctataaggctgtttttaacacaaatgtctgacctcttttttgttttcggctgatcatatgtaaaagcgattatatgaatcgctttttgatacttagaaacatgctaaccttcgacctctttatcagtaagcacttttaaagcatttcttacttttaaggcgaagttgacaggtttatcaatcgcttcgaaatgaatatacatcagtctcggtttgtcaaacagccagtgattgtgtagagacgttacaatcagatcatgtttccgaagagcgctgataaatggattgatttctttttgcagaattacagtttctccgctgcaaagagcacggccgtcttttgtcattgattcaaatgaaaacatttgcggaatgagcaaaaatgatcttccgggccgtcccagtacaaccggttttatattcgttcgtgatctcattactgtacaaattccattttcaaacgtatgcatggttccgcccagaatatcgttgaattcgtcacaaagaccatgccgttcaatcatttccccgtcagtttttggtaccgcacgcacagttttagtagtcagaactcttagggcctctcttacttttcttgcaaaattgagaggtttgtcaattgattcaaaatgcataaacatcagacgcggtttatcaaacagccaatggttatgaacggcagttacgatgataccgaatttgcgcagttcactcattaatgggttcacttcttcttgcagtaaaacagtctcacctaaacataaggctctgccttccgagtccatgctctcaaatgaaaaggcctgaggaataaaaggaaatgcctcggctcttcttccgagtaccaccgggtgaatgttgcttcgaaatcttgtcgccgtacatacgccatttacgacactgggcgttgaattgagaattcttgcaaattctttgcagagtcgtgatggctccatactcgtttcttccacttcatatctcctcctgaaatcaatttaaacgtacttaatagtaaagatatgtgaagatagaaaaaatgtaacgcggcaggagtccataatagagagaatcagcttttttcaccatctcttcaactgttaattattaatagattttaatcggactatttaagatgtgataaaagccttccggatgtgtttgtccattcagtttacattgggtgatgcctttttcttttaccatgttttctcattcgcttatgattactttgcccaacccgtatttgcggtaaggcttcaggatgcagattcgttcgagcttgcctgtttggtttacgatgcggatccgtcctgtgccggcaggctgattctcatgataaaccaagacatgcccgcactgttccccaagcgtatcgaactgatcaaattcatcggattcaggtacttgctgttcctcaatgaatactgcttttctaatctcaagcgctgcttgtaaatcaatttctgttgtatcctcatgatcaaccaacccttttcacatattagtctggactgcacggcttgcttgtggtcttatagaagtaacgacgaaacatttatattgcaagtgcaacaaaaatatgaagggtttgaaaagatatgactgatattttgcgtgaaatcggcatgatcgcacgggcattggattccatcagcaatattgaatttaaagaattagacttaacaaaagggcagtatctctatcttgtgcgtatatgtgaaaacccgggagtgatacaggaaaaactggcggaaatgattaaagttgaccgaacaacagcggcgagagcgatcaaaaaactggaaatacaaggatttgttgaaaagcgtcctgatgatcaaaataaaaaaataaaaaaactgttcccgaccgaaaaagggagaaaggtttatccgttattgcaaagagaaggagagcactctgcggaagtagcactgtccggctttacgtctgaggaaaaagaaaccattttcagccttcttcagcgggtgagaaaaaatatagagcatgattgggaatatgtgaagaagggaaacaaaagagactattaatggatgataattccttttactgaatgattgcgttgtgaatgattaaagtcataaatggatacgttatctgtgaaatctccttcctcggttcctgcttcaactagccgataggcttatttttaacgaaaagtatcaattatggtatatttaaataagacaaaataattgaagcggggaatgatatgagtacaatcgaaaaacaaagacgtaagaaattcagagccaaatcaatcgtacgggtcatcatggtcatcatcggcggaattattgccgcgtatggactggaaaccgtactgattccgaatagtgtatctgacggcggtgtaaccgggctcagcattgtcggttcacagctgtttcatttgcctcttgggatcttgattgcggtgatcaatataccgtttgtctggttaggatataagcaaatcgggaaaggttttgcgtttctatcaattatcggtattgtctcacttgccgcgggcacgagttttttccaccacacgccggctatcattgagggagataccctgttaatcaccgttgtcggcgggattattctcggcttgggaatgggattggcattgcgcaacggcggcgccttagatggaattgatatgctggctgtgcttctgtcacggaaattgccgtttggcacgagcgatctcattttatttttaaacatttttgtgtttatttttgtttcttttgtattcgggctgcaaggcgcattgctttccgtcattgcttactacatcgcatccaaggtgatccatgtggttgaggaaggcttaagcggttctaaaacatttcagattatcaccaacgagcctgcattaatggtagagaccattcgtgaagaattgggccggagcgctacgtataaagaagcatacggcggtttttctcatgaaaaattcaaagaaatcacatgtgtcatcaaccgtttggaagaaaccaaactgaaggaaattattaatgacattgataatcaagcctttgtgacggtatatgatgtcgctgaagtaaaaggcagtaatttcagaaaaatccataatcattaagaaggagctgccgttcaccggcagctttttttaaaaaggagaaaacacttgcaaaaaaagaataacggatgtatattattgatatatcaaacattgactagtcaattaattgcgcaaaagaaagtagggatgggttttgacagcatgttgttcagaggaaggcgagattttgtatcagctccaatcactgcacaaagtgatcggcacgaagtttgaagcgtgcaccggaatcagccaatcccgccttgagcttctcgccgtgcttttttacgtcgatgagatcagccaaagcgatcttcagaaaaaggtgaatattgacggcgcagctgtgacaagacacttgaaacagcttgaagccaaagaaatggtcacaagaaggcggaagcctgaggacaaccgaattatacttgtccggcttactgatcaggggcgggagagaattgaggcttccaaaaaggagaaggagcgtttcataaaggaaatgcttgccggtgtcagcgaggaagaacgcagtatgttaaaaaacgtattgtcgcagatgcagaataatatagaaaatatgaaagcataggagtgtattacacatgaaaacagaactgaaaacaaacgattttatggacattatgaaaggccgccgttccattcggaattacgatccggctgtaaaaatcagcaaagaagaaatgactcaaatattggaagaagcaacgacagcgccgtcttcagttaacgcgcagccatggcgtttcctcgtcattgacagccctgaaggaaaagaaaaactcgcgccgcttgccagctttaaccaaacacaggtcagcacatcatctgcggtgatcgcggttttcgcagatatgaacagtgatgactatttagaagaaatttattcaaaagcggtcgagctgggctacatgccgcaggaagtaaaagacagacaaatcgctgcgttgacggcgcattttgaaaaactgccggagcaagtgaaccgtgaaacgattctgatcgacggaggtcttgtttccatgcagctgatgcttacggcacgcgcgcacggctatgatacaaacccgatcggcggctatgataaagaaaagattgccgaggttttcggaatggataaagagcgttatgtaccggtcatgctgttatcaatcggaaaagcggcagacgaaggatatgcttcctaccgtcttcctatcgaaacaatcgcacaatggaaataaggttgaagtgaagctgagaggagagggacagtggacataattgcggctgttttcgtcggaattgtagctttagaacatatatttatcatgatacttgaaatgttttttatcaattcgaaggctgccaagcggtctttcaaattgccgaagcatttagaaggcgatcggaatgtggcggtcatgtttgcaaatcaaggtctgtataatggatttctggctgccggcctcatttggggactgatcctcggagctgatccgattggccatatgattcaaatgtttttcgtcatctgtgtggtcatcgcggccattttcggaggctttacttcaaacaaatcaattatcgtaaaacaaggacttccggctgttttagcgcttatttttcttttattggcgtagcagacggagtgagtgagggcttccggaaaggaagccctctttttttattctgttttgaaaatcatttcttatatacatcactatagattggggatgtcaaatcagctgtcaccccttcttaattgttatttgctgaaagtcttctatctgctaataaagcctaatagatggagtggactccatgtcaatctgtttttttaaaaaaagctgatcggtaaatatggtatgatttacataatcagggagtggggttgcagaggatgaatatgaagagagcgtattacgctattttatacagccagaccgctatcaacttggggttttcactttatacgatggccgtcatcttgtttttgtttacaaaaaccggttcgacggcgatggcctctcttatgacgctcgtcagcattgtatgccgcgtattgggcagcgccgttttgccgctggtcaccggtcggttcacgcttcgttctttgttaatcagttctcaattgatacagatcacactgttagtctgtttgttttttgtcatccaaaccggttcatccgcattcttttttctgctgttttgtctgatcggaggcatttctttttgcaacggatggtttgctccgataaaaagcgcgctgattggggaaatcattcctcctgatcgaagggcgaaagcgaacagtttattatcggcggcggatcagaccgttcagtttgcggggtggtctctgggcggcgtcatcatagcgttcctgggagagagcgatacaatgatcgtcactgtcatgttattggtttcttcggtgttgggcatcattctgtttcttcaagtacgcatgtgtgcgccggcagcagtcagggaacgttccctttttgcagatgcggcaagcggctgggtgtatttatttcagcaaaaacagctcaaggttctcattgtgatggatgtgatcgaatcgtgggcaggcatgatatggatcgggtctgtgtccttaacttatgtgcatgacgtccttcataaaggagaggcttggtgggggtatgtcaacggagtctattatgcagggacgatgatcggcggactgatcatctataagttatccggtaagcttcagcatcatctcattccgcttatgctgacgggagccttggcatatggaatgttcacgtttatttacgggctgatcacaagcgccgttacggccctttttctggtgctgtgtatggggccggcttgtgtattacgagatctcacgcaggaaacattacttcaaaatatcacgaccgaaaagacacgggtcaatatattagcggcgagatcagctttagttcagttcatttttatgttttccattatcggaacggggattatctcggatgtattcggcgtgcggtttatttatattggcgcaggccttctcttattaatttcggcttttatcggattttctcagctgcgaatgaagaaaatggtacagagcggcatgtagtgtagtataattaggaacgtacgttctatatcgagagaggagagggtaatgtgggacatctggcactgcaattgtatgattatcatctttgggcaaatcagcaaatattcacccggcttaaagagcttccggaggatgtgtaccgtaaggagattcaaagtgtctttccgtcgatagccggtgtattgactcatgtgtatctgtcggataaggggtggtttgatgtgttctccggagagcgtctggaggatacgctgaaatcagctgaacagcaaaaagaggacatcttgtctaaagagatagaagagctggaagatctatttttgaaattatcagaccggtatcaactatttttgcagaaggaggaaaatatcagcctcccccttgaaatagagcatccgtcaggtgacatcatgaaaaccgcagcggccgatatgatcctccatgttgtgaaccacggaacgtatcatcgcgggaatataacagccatgctcagacagatggggtatgcttctgtgccgacggattacggtatttatttatatataaacaaaaagtaaacaagacaggcaacgcggctgtcttgtgatatccgtaaaaaagccaaatcatatgagtgatttggctttttcgtttgctatgccatgttttgcagccgttctaaactgtttttccaattcgcttcaagcgctgtaaaagcagcggcggcatcttgctgttctaatgcgtgaatgatatcagagtgttcattatatgatctgtttaaagcgccgttttcactgaaatagcggatttccagtctctgaattttgactttcaggcttactagcaatttgtgaagttcagcgttgtccgcaagcagaatgatgcgatggtgaaatgcattatccgcttccagaacggccattttatcgccgtctttcatcgtttgaagaagattttcattcagctgtttcaattcttgaatcacggcatcgtccatacgcgggagggcttgctgcaatgcgagtttctcaagcgtccagacgatggaatacaagttttccgcttcttttaactcaatcggagcgacaagtgtccatctgttcgcttttgttatcaccaagccgtcatcttccagccgcaataaggcttcccgtatcggggtgcggctgattcccaatgtttccgacaaatccttgtcctttaactttgtttccggtttgagcttgcccgttatgatccagtttctgagtgtgcgatacacttcgtcccgcatgatggttcttttcagcacaggttctttgttttgattatccaatggaacacctcatgaatcgtagtatacatatttgcattttaccacagtccgggcgccggttagaaatgaagagggacgtctaagaatgaatcgaaccgagatgcttcatctcaatatgctgaaagtcagcggagccgccttcagaaaagagcgtgattccctgatcttcgtgttttgggaacacttcatttgtcaaaacggtttttccgtcgtctgcaaatacttcaatacttgttttatccacgagaattttcagatgaacgcgccctttgtttccgtcaaatggggctttgctttcggtgtatgcaccggttttatcaggctggtctgtaaacgatctgttcacataggcacaaccgtcttctgctgaaataccgacatcaatatgccggctttggtctgctgattctctgagtctgacgcctgcatttttgatatctgaccaagcgatatccatatcaagctgatatgtatcacctttgatcggcagtgtctctgaaccgttcacctgtttgtgttctatgctgtcagttgaagaagttaattggttcaatgcttcaaccggctctgacacaaggctgtatgtgccgccgtcctgctgctgaagacggatttcacggacgatagaatccgtgccgttaaagccgttttttagtgtcggtgtttcattcggataatcccaattgttcatccatgccagcgcatagcgttttgtcagcggatcttcgctattaccgtcttcaaatgtgacgccgccgtaccagtcaaagccgtaatcaagccattgcggttcttcttgatcggcggtaaattccttcccgtcaaagtttccggtccaatacgcgtacgtattcggtttgcctgcgggtttgccgtttgcgcttgcgcccagaacccacttggctgtgccgtcatctgcacgcatcatataaaggtcggggcattcgatgaggccgatctgctgagtgataaaaccgcccgtgtatttccaattttttaaatcgggtgattcataaaaaccgattttttctccttcggccatggccatcacccatttgtcatcctgttcatcccagatcactttcgggtcccggaaatccttagttcccgggtttttcataacgggctgatcactataggaagtaaacgtttttcctttatccgtgctgtaccataaatattgttcctgggcttttgttttggctgtcggctgcgttgtgacggcgaccagcgcgtttttgccgaagcccgcggtgttgtgtttatcaatgacgacagaaccggaccagatatcgccgttttcgttggtgtatttcggaatagccgtgccttcgtccgtccagtgcaccaagtcctttgatacggcgtgccgccattctgtgccgttgccgttcgggtaatcccgattataaagatagtagtaatgatatttcccctcgaaaaaaataggcttttgagggtcgtttttccatttgtccggagtcgtaaaatgatacgccgcccggtaatccttcttatgctccgtgttgtttgtgtcagaggaattgtggtttttgttcggcagtaagccgacaaacaggaacgcacccaaaaagatcaatattacaacgggccattttcgtgccatgattgaattcaccatcttattgagaaataaaagaaaatgccaatgaagtatcggcattttctttttgttgttattagttgttaaccgtaagctgtccttgttcaaggatgctgtttttaacaacggatgttttcttgcctttgatgttcattaagaagcttggcgcaaatgtcgcctttttatcctcaaagaagcctctgtttgtcatgtagcttgtgatcacgacattgttgcctttggcttgcggcactgcgaagtgagagtaagtgaacgttacgtcgttaggatcaagacccatttgcaggacaagaccagttttgttcagcggcttgtaaggacctgttaaagagtttgatacataaccaagcatgtaaatatcgtttgagttaataccgtcgatcgtcatttttgaaccgcgtgaatcagtgaacaggtaccatttgccgttcattttgaaaacattcgcgcgctcgatttcatcagttaccgtgtttgaagtgatcagcggcttcatgacttttttcaatgtgtaatcatcgtttaactctaccataccgagggcgccgttcgctaattcagcatcgcgttttttagcgctttgctgaagcttctgactttctttacggaagaagtttgtgctgccgccgtagtacgctttgttaaataaagattcttcgccttggtatccgttttctgttcccgtgttggcttcgaatacaaggtatttatgtcctttgtcttcaacgtagtgagggtctctcagcgtatggttgtcgccggatgtatagttcccttcatcgataaactgctgaacgttttgatatgtttttccgtcgccgtcaaaaatcgttttatgatcttcaactccgttgatcttgagcgtgtcatcagattttgacacatttacctgcgccgttgtcaggctttgtttgccgtaatgtttaccggaaaagtcagtgtagaataaacggatttttccgtcagatgtaaaggttgcagaaccggaccattcttgtgtctgttctttcaggatttcatcgttggcgtcgaacttatcgctgtctttaaagacacggcccgcgtttttccagctgtcgatcgagttgtcgccgactttttgataaaacatgtagatggatgtgtcatcagcgtctttcgggcttccggcaagagcaaacacgacgtgatagccgttgtattcagctactgttccgtcagcgttttggagcggccagctgtcccacacatccagtcctttcgcggactcgatatttttaattgttgatgggtcgaattgaggcacttggtatttttcactttgctgctgtttagggatctgcagcatatcatggcgtgtgatatgagagacgccgtacgtttctttgtaaggtttttgggtattttctttcgcgaaggcttgagtcgctcccctgccagaagtgcagtcgtaaaagttagaactgtggctcgttttgcaaattttttgatgttcatgttcatgtctccttttgtatgtacctttttttgcgatctgccgattcgatcctcctgcattcatggatgacaggtttgttacagaaaaaaagacctaaaatatgtatggggtgacgccaaagaatacactttgcccttaacacattttaggtcttgcctgctttatcagtaacaatcctgcatgatttacttgtcgacatcattctattagactctgattctattgacaactggtctattttcctcttttggatgatagtaaaatgaaaaaaggccttttaatatatgggtaattgagcctaaggggtgctctggccctaggaaaaaacctctctaaaaaagagaggttattttttcttgatagataataaagcgatggtggttaaaatcagcaaagtacccagccattctgatattccgaagggaacatgcagccagataacagttaaaaaagctgccgacagcggctctgcacaggcgagcaggctggtttcagaggcactcagatatttcaggctttccaagtagcaataaaaagcgatgagcgttccgaaaatgatgataaacacaatcgcggcatatgcaggaaaggaccactcgccttcaaatgtccagggcgggcggatcaagctgagggcggctccgccgatcagcatgccccatcctacaacaatggcggatccccatttcttcagcagacgatgcggctgaagggtgtaaaacgccagtgcaaacgccgaactgattccccaaaagacggccagaccggatatggacaggcttccgacattcccgtgcgtgaccaaaatgaatgtgccggcaaccgccaataagacggcgagcagctcttttcctgaaggaattctctttgcgcgaatcgctaaaaagcatgtaatgatcgccggtcctaaatactgaagaacggtagctgttgccgcgttgccatgctcaattgccgcgaagtaggtgtattgaacacctaacattccgaaaatcccgaataaaagaaggggaattctgtcccgtctgtctttccaaacagcccatatccgtcctttttctttgcggtacgcgattccgagcagaagcgcccctgacaccagaaggcgcaccgaagtcagccattctgtattaaaatggcggtgctggaacagatactgggcaaccgttcccgagacccccataagatagctcctgtaagcacaagccaaatgcctgttgttcgtgaataagaaagagcagcgtgtttttccaggatagacacccccgattctgatgttgcgacagcaacttacaataattagaaaaatgaacgccttacatgtgatatattatatattgtatattaataggcgtcaaaataattttagagtaagcgcttacgaaacggccgtctgatgaacgagctgtaaaaaaaacaccccggctggttgccggggtgttttggttattctgcaatcgcgtctgttaaaacaggaacgacttgtttctttctggatacgacgccttttaaaagggccgtgttgttttctaacgtcacgttgaatgctttttccacttttgacgcttgatcaccgatggcaagcgcaagggaatcattttccagaatatccgtaatcacgagaaggaacaggtcaaggttcttctcggcaattacttttgaaagagccgcttctaattccggctgccgctttttgacatcttcaatatcaactgtgttgacttgggcgatttcgacttttttgctgccgagcgtgaactctttcgcatcaagagaaatcagttcttccacagtttttttgcttaagtcggcgcccgctttcagcatgtttaagccgtactcttccgcatctacgccggcaatttcagcaagctcttttgccgctgcgatatcttgctccgtgcaagtcggagatttaaataacagagagtcggaaatgattgctgacagcatgaggcccgcaatttctttctcgattttcacgttattttctttgtacattttgtttaagatcgtagccgtacagccgaccggctcagcacggtagtaaagaggttccgctgtttcgaagttggcgatacggtggtggtcgatcacttcaagaacctgaacgtcttcgatatctttgatgctttgctggcgttcattgtggtcaacaaggatgacgccgtttacttcgtttgcggctgtttccaccaaacgcgggctttcctgcttgaaataatcaagcgcgtattgtgtttcgccgttgacttgtccaaggcggacgggctcagcattgaagccgagtttattttttagatcagcgtaggcaatggcagagcaaatggtatctgtgtctgggttttgatgtccgaaaataagaattttttccataataactccttgtccttttttgtagtgtaaacaatctttttatagtttaacacgtcttgcggagggtgtaatcttcaaaaccttaaaaattgatgtgaaaaagaagcatttttgttgagcggtgaggaggattgcgagtaaaatactgggtaagtcagatgctaatcagcatatagtatcaaaaaaggtactatggaggatgaaaaatgaacatatatccgaataaagaaggttgtccggttgaactgacgctttccgttatcggcggaaagtggaagggtattttgttttatcatatgatcggcggaaaaaagcggtttaatgagtttcggcgcatttgccccagcattacgcagcgtatgctgacgcttcagcttcgcgagcttgaggcggacggcatcgtgcatcgcgaggtatatcagcaggtgcctccaaaggtggagtattctcttaccgaattcggcaggtcgctggaaccgatcgttttgcaaatgaagaaatggggagatgccaaccgggagtttctcgagacataccgggaaaaaacgtcgcctcaagatcagtccgctcaaaaataagaagcagcaaaggattaaattccttgctgcttttttttatttcatcgcgatggcttttctggcgttgcgcacatcattcttcagcaattcgctcaggttgtaagccggatattgaccgcgttcttccatatactcaaagaccatttgatgccacttgatggccgcgtttaagtgcttgacgaaaacgtgtctcaattggggtgtggccgtctctgtaatggctccggcgtaattgcgcacagacgttttggccatgctcagcagaccgccgctgtaaaacgcggaatcagcgcgctcttctgtttcatcctcacgaaaagcgggagcttcagggaagaaaggaagcagttcacgcagattttgttccagcgaatggatggaaaatcggtaaagctgttttaatctggcatcgcttacgtcccgctctgttctttttaatttcacaagtccgtttgcctggaaagccactaactcatgcagttctaacgtttcatgccatgctaatgttctccgctcggtcatagtgtaagaatctcctttatccttcattttcactttcagcatatgccccggtcccgatgttgttcctgatgttttgaagtttccagaaagggaaactcaatgtaaaggaaatacgaaatagaggtgaaactatatgtgggacatgataaagaacttcttccttttcagcagcggggttttacaggcgaccactctcttacttatcgttatcgtcttgttatatgtacgaaaaaccaaaaagaaaaacagagaaacttctggttttatggatgatcaggatcactgatacaacgggcattctttcacggggatgtccgtttgtctgttttcatgtttcacatggaacattgcggctgtccgcgctcattttacttgcgatttcgacttatgttaaaatatatacgtgtattttggagagtttatggaaaattcaggtcttgaaagagacattgcggcgtcaaaagagcagtcgtctaagctgctcttttctattcgtatgttcgaatgatacaaggtttgaggtgagtaagtgaaaaatacaagggctctaatagaaggcgccattttgatcagtatttttgcaatcatttcccttttggtcgtgtacctccctttactgggggcaattcttctctttgctttgccgctgccgatcattctttacaccattcggcacggtctgaagcccggggtatggatggggcttgccagccttcctgtcagctttattgtaggttcgtttaccgggcttacaggcgcttttacggcggcctgtacgggaatcgccatgggatattattttaaaaagaaacagcccggctatgcggttgctgccggcgctatggcgtatgtgctgtgcggcgtcgttttttttgtggtcagcatcgtgtttcttaatatgaatgtgatcgataccaccatgtcccagcttcgggagtcgatgtctttagcagaaaccatgtcaaagcagctcggttacggagatcagttcgggaagcagatcaagctgatggaaagtcagctgagcacggttcaatatctttttccgacagtgctcgtattgaccggcatcgttttttctttcctcagttatgctatggcaaggccgcttttacggcgattttcccctgatcttccgaagatgaagccttttagagagctcaaactcccgcaaagcgttgtcattctgtattttattgtgacgatattagggtttctgcctttagaaaaagggcatatgctgtattcggtttcattgaatgggggatttattctcagcttgctgatttgtattcaagggttagcgtttatttttttctattgccgcgaaatggagatgccgaaagccgttcctgttttagcaattgtgctgggtgtgctttttccgctcatcttgtccgtgtatctcctcttaggcatcattgacataggctttaacataagaaataaggtgacgcgaaattgagtgtgacttacaggtggggagttgatagaaatgcctagtttttatgaaaaaccgttgtttcggtatcccatctatgcattgattgcattgtcaatcatcataatcctcatcagcatttactttaactggctgataggagccatcggcgttgtgctgctcgccgtgatcctgtttttcattaagcgtgcggattctctgatcagaaaagaaattgacgattatatctccacgttatcgtatagattgaaaaaagtaggcgaagaggcattaatggaaatgcctatcgggattatgctgtttaatgatcaatattacattgagtgggcgaatccgtttttgtcttcctgttttaatgaaagtacgctcgtcgggcgctcgctgtatgacacatgcgaggccgtcgtgccgctgatcaagcaggaggtcgattcggaaacgatcaccttgaatgagcggaagtttaaagtagtgattaaaagagatgagcggctgctctatttctttgatgtgacagaacagattcagattgaaaagcagtatgaaaatgagagaaccgtgctggcatatatctttttagataactatgatgacgtcacacaggggctggatgaccaaacgagaagcacgatgaacagccaggtcacctcattattaaatgcgtgggcgcaggagtacggcattttcctgaaacggacgtcctcggagcggtttatcgcggtgttaaatgaacacattttaacggagcttgaaaacgcgaaattttcgattttggatgaaatccgtgaaaaaacatccgttcacactgtatctttgaccctcagcatcgggatcggcgcatcggtttcttccttgaaggagcttggagatctggcgcagtccagcctcgatttggctctcggccgcggaggcgaccaagtggccatcaaaatgccgaacggcaaggtgaaattttacggcggcaaaacaaatccgatggagaaacgcacaagggtgcgcgcccgggtgatttctcacgcgctcaaggagattgtctcagaaagcagcaatgtcattatcatggggcacaaatttcctgatatggacgcagtcggagccgcaatcggaatattgaaggtggcgcaggccaacggcaaagaaggctacatcgtcattgatccgaaccagatcggatcaagcgttcagcgcctgattgaagaaattaaaaaatatgaagagctgtggtcgcggttcatcacaccggaagaggcgatggagatttcaaatgacgacacgctgcttgtcgtcgttgatacacataaaccgtcccttgtgatggaagagcgtctcatgaacaaaatcgagcacatcgttgtgattgaccaccaccgcagaggcgaggaatttattaaagacccgctgctcgtttatatggagccatacgcttcatccaccgcagaactcgtgacggagctgcttgaataccagccgaagcggctcaaaatcaatatgattgaagcgacggccctgttagctggtataatagtggatacgaagagtttttcccttcgcacgggctcgcggacgttcgacgccgcttcttatttgagagcgaaaggcgcagatacggttctggtgcagaaagttctcaaagaatccgtcggttcttatatcaagcgggcgaaactgatccagcatacagctctttataaagaacatatcgcgattgcttctcttcctgagaacgaagaggagtactttgaccaggtgctgattgcgcaggcggctgattccctcttatcgatgagtgaagtggaagcttcatttgcggtagccagacgggatgagcatacggtgtgcatcagtgcgagatcgctgggcgaggtcaatgtgcagattattatggaggcgctggatggcggagggcatttaaccaatgcggcaacccagttatcgggcatttctgtctcagaagcgctcgtccggctgaaggaagccattgatgaatattttgagggaggcgttcagagatgaaggttattttcttacaagatgtaaaaggtaaaggaaaaaaaggcgaaatgaaaaacgtagcagacggttatgcacataactttctcattaaaaaaggcctcgctgtcgaagcaaatgcgacaaacatcagcgcattgaaaggacagaaagaaaaagagaaaaaagaagcgattgccgagcttgaaagagcgaaagatttgaaagaaacgcttgaacagctgactgttgagctgagtgccaaatccggtgaaggcggccgccttttcgggtctgtcacaagcaagcagattgcagaagcgctgcaaaaaacgcataagattaaagtggataaacggaaactggagctccaagacggtatccgcacactgggatatacaaacgttcctgtaaagctgcaccctgaagttcaggctgtgctgaaggttcacgtaaaagaagaagcgtaatacacaatgaaaaacccgccgatccggcgggtttttttcatgtcagcagacggcgcagcgcaagaaaatgatgagattgtttcatttccgatcgttaccagattgcatattatattacatcataacgaaggatgtgtcggtatgaaacgatttttttctgaaacatattttaataatccggagaataaaaaggcgctggagcattatccgctgatcggagacggaaaagacggggaagtctaccgcttaacacacaacaaatgcataaaatacttctttgaaaaagggacatgcaagaaggaattggcggctttaaagaccggacaaggttccccggtgattccaagactgtatgaatacggagatcgttatattgtgatggaatacgtccaaggcacctctcttgcccgccatatcagaaaagaaaaatccctgtccgtcaaaatgactgctgatattttaaatatgctggatgaattaaaaagaatcggttttaccagatgggatgccgaaatcaggcacattctgatcaatgaacacggaaatcttaaagtcatcgaccataaaagagctttttccgctattacccggtttcccgtaaaactattaaaaggactggacaaatacggcttggcggatgagtttttgaatactataaaaaaattaaatccgtcacgttacctggaatggcagccgcacatgtaagtttctgaaaatccgcacatgtaagtttcctttttttagggtcgtcatatgatatttgtaacatttgtttggtggagtgtggaaaaaatggcagaatacattatggttatcggcgctcatcccgatgatgaactattgggagcagcgggcaccataaaacggctgatcaatgaaggatataaagtgatttccattattacggcattaggaagaaaagaagaagctcatcatattaaacaattaggcgaacgcgcgaatcaagagcttggaattgagaaagtcatctttttggagcatacgaatttagagctggaatgtatccctcttcataagcttgtcaaagaattagagcagctcattcgcgtctatcagcctgataaaatctttacacatcattacggcgatatcaatatggaccaccagagaacattccaagcagttttaacagccgccagaccgcttccgaatcaaaaacctatcgaactgcttacgttcgaaacgctatcttcaagcgagtgggagaggaatacggctgataaactcttcaaacctaattacttcgttaacatcacagacacaatggatgctaaactcgcggcgcttcaccactatgacgtagaaatgagggattaccctcatccccgttcatatgaaggcgttaaacatttaggaaaagtcagagggatgacggcgggtgtggaatacgccgaagcttttgaagtcgtgcggaggatctggaaatgatcaagacattttccgtcccgtatccgtatatggtccagacgcttgaccgctactacggggtcaaaacgcgccctcaaaaaaaggcggcagtaaagacacagttgaaacatgaacatcatattccgcggttatacaggaaaaaaaagaagttatccattttgattgccacgttttgggactacccgcacacgggcggtttatcaaactatattaaaacgcttagtgaaggcctgaagaagaggggtcataaggtggatgtcatctcccctaatctgtttccgtccgcacaggtaaaagaactgcgggcggctgttgttccgaagttaaaagatttctttaaggacagatatggggattataacaatcatattttgaaaaataatcggctgatgtttatatacgagcaaatgcttcaaaagattcatttggaaagatatgatgtgtttcatgctcaagatttatttacagccaatatattaggcagattcaatcaaatctataagaaacctttatttttcacaccgcatggcatgtttactttcaacagacttaaatttcacatctttaaaaaaggatcgatagaagagttttattataaaaaactagagatgaaagccattgaatacgcagatcgcctgattattatcagcgatacgttccgcagcccgctcatgaagctcggagccgaacaggaagacatgacaacggtgatcacaggaatcgattacgatgcaaaaacaggcgggaaaagaaaaatcccgctgccgaaaaataagatcatcatctcgtgtattgcaagattaggcccgagaaaaggacataatcatttgcttgacgcactttcacgaattccgtctgatgtacttgagcatgttgaagtgctgatcgcgggcgacggagagatgaggagcgccttagaggaacaggctcgaaaactgaatctatctatggtttcctttttaggaaaaagagatgatgttcccgctattttgaatatgacggacatattcgtactgccgaccgttaatgacagtctgcctatttcgattattgaagcgatgttcagcggctcggctatcatcgcgaccgattgcgggggtattccggatctgatccgccataacaaaacggggcttattgtcgagccgggaaatgcaaaggttcttgcccgggctttagcgttttttatcactaacaaatctgcgcggaagatagctgcttcaaacgcaaaggcctacgcggagaaatatttgagcagtgagacgatgataaaaaatatcgaatcgatttatcaaaataccaacagctcggagggagatcatgaaacatgaacatgcagccgttgtactagatttcagtgcaaacgggattgggatcattcgcagcctggcccgaagaggaatcgatgtttacgcatttgacacggagggaccttatcgtatcggaaaatcaagattggcagattgcgggatatgtcccagccctttaacacaagaggaagaactgctgacattcctgactgatttcgggaagcgattccaagcaaagccggttctgtatgcaggttctgatgattatgcgggatttatatctaaattccgcgagacattagccggtttttttttatttttgctcccgagccgctctctgttagaaacggtcttagataaaagcaaagcatatgaattagcggtcaagcataacatcccctgcccgaaaaccttttttccgaacaaccgggatgagctggaagaggccatcgccaatattgacttcccgtgtattttaaaaccggtggccggccatgaatacagaaaaaaagtaaacaaaaaagcaattgtaatgaaggatgccgcacaattgcgcaaggagttcagctcctacagagaaaatggagaactgctcgtgcaggagatcatccccggagacaaccagtgtttttataaagtcgccactttttatgatgaccaaatgaaattaatgggcttattctctctgcaaaagaaccatcaattccctgctgattttggcgcgggggcccacgtcgtcagcaaacggcttcctgatttaatcgagaagaccctgccgttttttgaagcgattcagctgaagggagtaggcatggcagaatttaaaaaggacccccgggacaatgtttataagtttatcgaaattaatccgcgcttttggctcagccatagcctgacagaaccggcaggcattcatttcgtttacatgtactatctgtatttgaccggacaacatgtgaagccccagctcgaacaaaaagacggaatcaactggatttatgaggtgcgttacttcttaacgtttttgaagaaacgaaaaagaggagaaatgacgttccgggatttttggaaaggatttaaaggaaaaaaagagtacgctctgtttgcttggaatgacccgatgccatttatcagaaacacttggtctcatctcaaaaacagctggaaacggaagcggaaggaagatcggcatgtatgaaaaggatcttttgtatgacgcatttcaaaaactgagaattgacgaaaaactgtcgtattcgttcggtgaaagggccgcggtgaatccggatgacatcacatgcctgaaatcaacagacagaagcgccatttataaactgtttgtaaagaaaaaatccggaattgttccgctgatattgaaggtgtataaatcttcacgtgaaaaaaacaaggtcgagattaatatatacgggaaagcccgttctgttttaggggatttgctgccggacatctatcttatagaggaaagtgaccatgaaacgtggatatttatggagtttgtcagccagatcagaggacagcttacatttcatccgaagcatttcaagtatattattccgtctgtcgcagaactgcacagccgcacctttgaaaacaaggctgtttctgacggtaaatggcggtcgtggctgccgctatacgaatcggaaaccatgagaaaagggcgtaaaaagcagatcaaaaagacagcggaattattggatagagctcttaaagatgagcgcacaaaggatatcgtgaagcctcattatcggcaaatcacaaacttgctggagcaggaggagccgggttttttccctgaattggtccaaaacggctcagccatcacacacggtgatcttcatatgcagaatatctgcacccacgatgcgtccggacatgaaccgtgggatattcaattcatcgattgggaatccgcaaagtacgcgccggtttggtttgatatgacggtgctggtcgaaattctgctcggcttcagaaaagactggagccggcacgcagaagatattcggacgtattgcgtaaaagtgtatacgaaagaaatgaaaaagcggggcattcattttcagacccctcctatgacgctttataaaatggcttatttgcagagaacacttgagaaagggcttcatacccaattgcggagaatcttcgacaatcggggaggagaactgctgccgtatcatgttgacaaagtgtcaaaatggggacgggaattaggattataagtttaagagagggggagcggatttgaaaggagagatcggcaagccgaacggtctggtgcctctaaccttattgcgcgtcatggatcaattttacgggatcgaacatcaaagtgagccggagatgctgtattcgttctgtgcggaaggaaaaagctcccccaaacgaaaaaagccattgcgtattctgtacgcaacctttctccgttacccgaatgtcggaggactggcgagttatatcacgtcaattaagacgggttttgagcgcatcggtcaccaggcggatgtcatctcgccgctccaaatgccgccaactttttttcaggaagatatcccgcgggccgctgacgagatcagagcgtttcttgttggcagatacggggccgcaaacgaaaagtttgtgaagaatctcagctatttacatgtctttcaaagatttttgaaggagaaggacttagaacaatatgacctgtttcacgcgcaggatttatttgcggcatttttgctgggataccttaatcaaacgtatcggcatccgcttttttttacgccgcacggacatttcacgaaaagccggatgaagtttcataaaatccaaaagggttcaatagaagaggcatatttcagtgaaatagaaaggcagggtattcgggcttcggataaaatcattacaatcagcgactcctttcacgagcccttgctggagtacggagcgaaggaggctcagctgacgactgttcataccggcattgacatccgggttgcacccgagccaaaacgtgctgaaaaggtcgtgattgcgtgcgtttcccgtctgaccgagcgaaaaggacatgatgtgctgctggacgctctcgcccgcatccggcaccatttatccggagtggatatatggatcatcggggacggaaacatgagagggtttctggaagagaagagacggaaactgggcctctcaaacgtgtttttcctcggaaaacgacatgatgtgccggcgcttttggctgaatcatctatatttgtcctgccgacattgaatgataatttccccatagcgatcatcgaagcgatgttctcaggtcaagccattgtcgcaactgactgcggaggaatccctgagatgatccggcacgaggacacagggcttatctgtcagcccggcaacagccgcgaacttgctgatgccctcgtaaagctgattacggatcagtctctcagggaacggcttggaaaagaagcgcgctcctatgccggccggcatctgcgtcaggaactgatggtttcaaaaatagaaaggatttatcaatcatttttctgaatgataccggcgccgcatggcaggtgcttcaagagcaaaataaagaggccggtgtttaactatccagcctctttccgagctgttttttcatctcatacagagtctgctgactttgtccgcccgggccgcctgtcattcctcatcgggctgagcctgtttttccggtgctgtatcggtcagctgagatttttgtgccgttctttttaatccatgagacaagctttgtgttgcctgaattgtttccggataataagaaatagttcacttttccttcgtcaacaagttttttcagctgtgagacggttttaccgaaattttcttcatggaaaaaagaggcggaaagccatcgcttccgcctcccgcacatatatatgagagagcagcctttatttgtgatcgttctctttttggatttcagctaatttggcaagcagaatgtgctgaggcatgtgcatgattctctcaagcggcatattcagtgattctgcgagcttttgcgccgtttcggcggaaatttgcagcggtttcatgtgatcactccttccgtttctttattgtactaaaatcagaaatctatcgtaagaggatatgacaaaggaatggaggtttgaaaagcggggctttataacagaatgggggaggttttttatgcaatcgccattgatgttattacagctgaagctggctgattatcagaaaaaagccgcagaactgcggacaattgacgaatttatcatactgaaacagacattgcaggacatgatgaaagtattcgccgcctttgaagaatgggagctgtatcaaaaaacggccgatctcatggcgcagacggtgctgcacatccgtttcatcgaataagaaaagccctcgcacgggcgaaggcttttcttaaaaggaacgttcctcttcaatgtttttatgctgatcataaatgacaagcttagccgggctgttctctttcgccatctgctccgctttttcaatcgccgcgtcctttgatgtacaaagagccgtcggcgccacattttccaccttcacaaaccatccgtccgcatcaacactgggtgttactgcatatgttttcatccttcttacctcccggtttcgatttatttatttgtttcccggcattcggaacggtaaaacacataaccctctcctgacaaatacagggaaagtgatatttttctattctttttcatgagaaatggtaaaatgaaatttggatattttttaaggaaaggacggtgcttagcatgacagaccttctgaatgatcggctgccgccgcaaaacatagaagctgagcaggccgtgttaggtgctgtttttttacagccgtctgcgttgacactggcttctgaagtgttgattccggatgatttctacagaatgtcacatcaaaaaatttacaatgccatgctcgtgctcggagaccgcggtgaaccggttgatttggtcacggtaacgtcagagcttgcgaataccgatttgttagaagaggtgggaggcgtctcttacctgacggacatcgcgaattccgttccgacagcggctaatatagaatattacgcgaaaatcgttgaggaaaaatccattctccgccgtttaatcagaacggcgacctcgatcgctcaagacgggtatacgcgcgaggatgaagttgaagatttattaagcgatgcggaaaaaacgattatggaggtcgcgcagcgaaaaaattcgggcgccttccaaaatattaaagacgtgcttgttcaaacatatgacaacattgagcagcttcacaaccggaaaggcgatattaccgggattccgaccggctttatcgagcttgaccggatgacggcgggttttcagcggaatgatttgatcattgtcgcagcccgtccgtctgtggggaaaacggcgtttgccttaaatattgcgcaaaacgtggccaccaaaacggatgagagcgtggcgatattcagtcttgagatgggtgccgagcagcttgtcatgcgtatgctctgcgccgaagggaatattaacgcccaaaatctcagaacgggtaatctgacggaagaagattggggcaagctgacgatggcgatgggaagcctgtcaaacagcggtatctttatagatgacacccccggcatccgcgtcagcgaaatccgttcaaaatgccgccggctgaagcaggagaacggattgggcatgattttaattgactacctgcagctcattcagggaagcggccgttcgagcgacaaccgtcagcaagaggtatcggaaatttcacgggcgctaaaagcgctggcgcgggagctcgaagtcccggtcatcgccctgtctcagctctcccggggtgttgagcagcggcaggataaacgtccgatgatgtcagatatccgtgagtcgggaagtattgagcaggatgccgacatcgtcgccttcctgtatcgtgatgattactatgataaagaatccgaaaacaaaaacatcatcgaaatcattatcgccaaacagcgtaacggcccggtgggcaccgtctcactggcttttgtgaaagaatacaataagttcgtaaatctggaaaggcgctttgatgacggcggtgttccggcaggtgcgtaaagcctcaagcaatgtcttgaggctttttttcatccgaaagaatgagagaatgccgtctgttcggcagtcgataaaaagaaagcgcttttatataatggcattaagggagggatgatgatgacaattgaatttccgcaatttcaagcggcgcaaatccggattgcccggccgaccggacagctcaaagaaatcatcaggttttatgaagaaggcctcggattgaagagggtcggcagtttttccggacatgagggctacagcggcgtcatgttcggcctgccgcatacgcaatatcacttagaattcaccgaagaaaccggctcgtctcagccggcgcccgttccgcacggcgacagcctgcttgtcttttacatccctgatcagcaggaggtcattcgcatcagcacgaaattaaagcagatgggatatgaggagaaagaacccgaaaacccgtactgggaagaaaaaggcgtgaccatcgaagatcctgacggctggcggatcgtcctgatgaatacaagcggaatataaatgactgtctgaagaacccgggatatgggttctttttcgtgttaaagtatgaaagtttcgggagtaatagatagcaaatgaaagagaaaacgcttttaatcaggtttaaggcgaacaaatatagaataataagattttaatgttcggatttacgattgactttctgtttcggcactgatacacttaatttgtttgaatgagatatcgttttgaaaggttaacggaggtgcacggatatatgtcttcagtagtcgtagtaggtacgcagtggggcgatgaaggaaaaggtaaaattacagatttcctatcagaaaatgcagaagtgatcgcacgttatcaaggcggaaacaatgcaggacataccatcaagtttgatggcgtcacgtacaagcttcatttaatcccatcaggaattttttataaagaaaaagcgtgtgtcatcgggaacggaatggttgttgatccgaaagcgctcgtaacggagcttgcgtatcttcatgaacgcaatgtgagcacggataacttgagaatcagcaacagagcccacgtcattcttccataccatctgaaactggatgaagtagaggaagaacgcaaaggggccaacaagatcggcacaacgaaaaaaggcatcggacctgcttatatggacaaagcggcgcggatcggcatccggatcgcagacctgctagatcgtgacgtgtttgcagaaaagcttgaacggaaccttgaagagaaaaaccgtctgctggaaaaaatgtatgaaacggaaggcttcaaaattgaagatattctggatgagtattatgaatacggccagcagattaaaaagtatgtatgcgatacatccgtcgttctgaatgacgcgctggatgaaggccgccgcgttttatttgaaggcgctcaaggggttatgcttgatattgaccaagggacatacccgtttgtcacttcatccaacccggtcgccggaggggtgacgatcggttcaggcgtaggtccgacaaaaatccagcacgtcgtcggtgtatctaaagcgtacacaacccgtgtcggtgacggtcctttcccgactgagctgaaagatgaaatcggggatcaaatccgtgaagtcggacgcgaatacggcacaacaacaggccgtccgcgccgtgtcggctggtttgacagcgttgttgtccgccatgcccgccgtgtcagcggaatcacagatctttctctgaactcaatcgatgtgctgactggcattgaaacattgaaaatctgtgtcgcttaccgctacaaaggtgaagtgattgaagaattcccggcaagtctgaaagctctcgcagagtgtgaaccggtatatgaagaaatgcctggctggacggaagatatcacaggcgcaaaaacattaagcgatcttcctgaaaatgcgcgccattatctggaacgcgtatctcagctgacaggtattccgctttctattttctctgtcggtcctgaccgttcacaaacgaacgtcatccgcagtgtataccgcgctaactaagaatttgcagcaaacaagcctccggtcacggaggcttgtttttttatgtaggaaaaaaataatagattttttttcaaaaaagtagttgccactttcgaatgttctatgatattataaatctcgttgttacggaacagcttcaatagagtactgcaagaaagcttttgtctcaatgctctatgatacataatccgacacatcaagagccattagctcagttggtagagcatctgacttttaatcagagggtcgaaggttcgagtccttcatggctcaccactttttatggcccgttggtcaagcggttaagacaccgccctttcacggcggtaacacgggttcgaatcccgtacgggtcattgatttactttagcgttattgctaactccttatttgtcctcggagggccgccacgatacggttctccggacaaattactgtaaggtccggtagttcagttggttagaatgcctgcctgtcacgcaggaggtcgcgggttcgagtcccgtccggaccgccattttactttactttatagtatagaaaagaaacatctggctcggtagctcagttggtagagcaacggactgaaaatccgtgtgtcggcggttcgattccgtcccgagccacttacccaaacgcatctgcaatagtaggtgcgttttttcttttgttataaaaaagggagagccggcttttcagccggcccagaagaagacgtcaaacactagacggcgttttttttcttaaggtttcaaaaaaatattattttttaaaagaaaataaaaaacatgacaaaaggatggcagttcaatacgtttttgcgctgttctctttaatttttttatcttttgacctgaaaccgttataatagacggggaacgtttttcacgatacgaattgtgatcatcatgaaacatcaatagatgaaatgaagtcattctggcaggaggaaaatcaagatgatggataagaaaatccttgtagtcgatgatgaaaaaccgattgcagatatattagagtttaatttaagaaaagaaggctatgacgtgcattgtgcgtacgatggaaacgaagccgtggaaatggtggaggagcttcagcctgatttaattcttttagatattatgcttccgaataaagacggagttgaagtgtgccgggaagtccggaaaaaatatgatatgccgattattatgctgacggcaaaagactcggagattgacaaggtcatcgggcttgaaatcggagcggatgactatgtcacgaagcctttcagcacgcgtgagcttctggcccgcgtcaaagcgaacctgcgccgccagcttacggttgcgccggctgaggaagaatcagcttctaatgacattcatatcggttctctcgtcattttccctgacgcttatgtcgtatcaaaaagagaagaaacgatcgagctgactcatcgtgagtttgaattgcttcattacttagccaaacatatcggacaggtcatgacccgtgagcatctgttgcagactgtgtggggctatgactatttcggtgacgtgagaacggtggatgtaacagtgcgccgtctccgtgagaaaatcgaggataatccgagccatccgaactggatcgtcacaagacggggtgtcggttattacttgagaaatcctgaacaggactaaccggcgatgaataaggttggtttttttcggtcgattcagtttaagatcacgctgatctatgtgcttctcattatcatcgccatgcagattatcggcgtgtactttgtgaaacaggtggagaattctcttctcaagtcctatgaattatcgttaaatcagcggattgacaatctatcctattatattgagcaggaatataaaggagataatgacagcaccgtcattaaagatgacgtcaaacggattttgaatgattttacgaaaaacaatgaaatacgggagattacatttgttgataaaagctatgaggtcgtcggttcttcgaggccttatggcgaggaaatagcggggaaacagacgactgacccgatttttaaacggattttctcaacaaaacaggcctattcaaaaaaatattatgatcctaaaagcaaaaacagagtgctgatttcagcaaaacctgtcgtcacagagaatcaggaagttgtcggcgcgatttatgtcgtggccagtatggaagatacctttaaccagatgaaaaccgtcaactcgattcttgcttcaggaacaggcttagcccttgttctgacggctcttctcggtatatttctcgcccgcaccatcacccatccgctatcggatatgcgtaagcaggcgatggaactggcaaaagggaatttctccagaaaggtgcggaaatacgggcatgatgaaatcggtcagctcgcaacgacattcaaccatctgacgagagagcttgaagatgcccaagccatgacggaaggggagagaagaaagctttcttccgttatcgcgtatatgacggacggtgtcatcgctacgaatcgcaacggggctattattcttttaaacagccctgcgcttgagctgctgaatgtttcacgtgaaacggctttagagatgccgattacgtctttattgggcataaaagagaactttacatttgaggatttagtagaacagcaggattcaatgctgctggagatcgaacgtgacgatgaaacgactgtactgcgggtgaatttttccgttattcagagagagcacggaaaaatcgacggtttaatcgcggttctttatgatgtcaccgaacaggaaaaactcgatcgggaacgcagagagttcgttgccaacgtgtctcatgagctgcggacaccgctgacgaccatgcgaagctatttagaggcgcttgcagagggcgcgtgggaaaacaaagatatcgctccgcgtttcttaatggtgacccaaaatgagactgagcgcatgatcagattggtgaacgacctgcttcagctttctaaattcgacagcaaagattatcagtttaatcgggagtggattcatatgatccgctttatgtcactgattatcgatcgttttgaaatgacgaaagaacagcatgttgaatttatccgcgagcttccggacagaaatctgtacgtggagattgatcaggataaagtgacgcaggttctcgataatatcatttctaacgcactgaaatactcaccggaaggcgggcatgtcactttctcagtcgatgtgaacgagaaagaagagctgctttatatcagcgtaaaagatgaaggtatcggcattccgaaaaaagatgtggaaaaagtctttgaccgtttctacagagtggataaagcgcgcacgagaaaactcggcggcaccgggctcggccttgcgattgcaaaagagatggttcaggcgcacggcggagacatttgggccgacagtgtagaaggcaaaggaacgaagattacatttactcttccatataaagaagagcaagaggatgattgggatgaggcgtgaaaatataaaaacagtcatactgtcagtgctggtcgtcattagtcttgttttaacatggggaatttggacattccagcccaatttttcagaaggcacggcctcaaccaaatcgactgtccgggaaaagcataaaattgataaaacgagccaaaaagtgtcgcaaacggtaaaaccccgggatatgtttattcatacaaacggctctcattataaagtggatgatgagacgctctttaatgacctgtgggcggatttgccgcaatgggaagtaaaagggatgaaggatatttccgatcaatacgacaagctcggttttaaaaattggctttacggcagaaacggcaattcggcaaagctcgatctgcaattcaatgacaccattccgattgatttcttccaatcgatgtttaaatggtcaaatccgtcaatggaatacagctcatttgaccatattgttattccgtttaatgagaataagacgaataagaagatttacatggtctcgtacagcaagcagctgattttggaagtgactgtggaatcggcgaattaccgcaatctgatgaatgagctgtacagcaaaaagtcgagtatgccgttataccacctctattcggtcggaaaaagcaaagaatttctcatgccgaatgcgcggtttaatatgaaggaaaaagaatttatcactgaaaccattaagacgaacctgtttaagcagacgctttttaatgatccgagcacggtcagagaggacccgaattacaatcggaatgtgctgactgacggaatcagccgtctggaaatcaattcgacacagcggcagattcaattccagcatcggaatttggcacaaagcgcttcttaccaaacgggtgagctgattaagaaaagctataaatatttagaggatacgggaagctggacggatcattatcaatttttcaatgtgagtgataaccagcagctgagtttctacatgtttaaagaccaaatgcctgtgatcaacagcacgtctaagcctttcggatccggacctgttttgaccctgcaatgggccaatgacgaggttctcagctacaagcggccgaactatgttctcgggccgaatccgattaaaacaaaagacgtaaaaatgatgaacggcaatgaggttgtgtctctgctggagcagcaggataaatacgacgtgaacaaaatcgaccagatcttcctgtcctatcaaatggtctcttcttcaacgaatgatctcgttgaactggaacccgtctggagtatgaagatcaacgggaagatcgtcccgattacgaaagatctgctggggaaggaggaggacgataatggagtggaataagacaaaaacgatcttcatcattgccttcctcatcctcgatatttttctcggctatcagttttttgaaaaacgctcgagcagtgaatacgaagtgattaaaaattcaaacgtggaaaaagacatggagatggaccatatcacattcggcaacctgtcttctgattccgcgacgggctaccggctgacggcgggccaaaaggtatttaccgctgaagatattgatgctttgaaggatcaaaagccgttaatggaaatgccggcggatgatcataaggtcacaacgctgaaaatgaaatttaccgatccggtcggtttatcgaagcaaaaaccgcaggaggatgcggaatcgctcgtcagttctaaagtaaccggcggtgaaaaatataaactgtggaaagtcgacaaggatcaaaaacagatcattttttaccagacatatgacggacagtttatttatcaggattttgactcgtccacggatgcgatcggacaggtgattctgcatctgaacgataaaaaccaggtcgtatcctacgagcagaccatgctggagtcattcaagcgaatccagaccgagagcctgattcctgagcttgatgcggtcgaattattgtattctcaaaattacttaaaagcgaattgcgccgttaaaagcgtcaagttcggctatattgcccaatacccgctgacaagtacgcaggtgctggcgccggtatggagaattacaattgaagataagtcaaaagggacgaagaaaaagacacagcaaacgtacactgtgaatgcattggaaagcacagtcattgataacaatcaaaataaataatggagtgagacacaatgggcttgcaatttagcgtgcttgcgagcgggagtaccggaaacgcgttttatctggagacagaggagcattcttttctggtggatgccggcctgagcggtaaagcgatggacgggctgatggagagaatcggccgcaagatagacgacgtcgacggcatctttgtcactcacgagcacagcgaccatattaaagggctcggcgtaattgcgagaaagtacggtctacccgtctacgccaatgaaaagacgtggaaagcgatggagaatcagatcggcaagcttgataccggacaaaagtttttgttcccgatggaaagcgtaaagtctttcggcgggcttgatgttgagtcattcggcgtctctcatgacgcggccgagccgatgttttatgttttccactaccaaggcagaaagctcgcgctgatgacggacaccggatatgtgagcgacagaatgaaaggcatcatccgttcggccaatgtgtttgtgtttgaaagcaaccatgacgtcggcatgctgcaaatgggcagatacccttggagcattaagcggcggattttaagcgatgtcggccacgtctcgaatgaagatgcggcgctcgccatgactgatgtcatcggcgacggcacatcgcgcatctatttggcgcatctgagccaagacaacaatatgaaggaactggcgagaatgtccgtgcagcagacattggctgcgaaaggatttgtcgccggggaaacgtttcagttatttgataccgatccgaaaattccgacgccgctgtgcgccgtgtaatttttccaaatgaatcatgattattaatccgcgatctgacccacactataagcaaatcgagtactcttgaaaggatttgagatagggtggattataatcgcgatgatgaacagtacgcctccgaacagccccgccgcagcaagagaggatactttctatcaagtctgatcggcgtcatcgtcggggccgcgctcatggctttcctgatgccgtactggacaggcggagaccatggagacagcagcaaaagcaccagccggcgtctcggcagcgaacaggtgaaaacagtcaacgtaaatgtcaatgacgctgtcacgaatatggtcagccgtgtatcggattcggtagtcggcgttctcaatatccaaaagactgatatttggggagagggcggcgaagcgggaagcgggtcgggcgtcatttacaaaaagaacggaaacacttcttatatcgtaaccaatcaccatgtcattgaaggtgcgactgagattgagatcagcctgaaggatggttcgcgcgtgcctgctgagctgatcgggagcgaccgtctgatggatctcgcggtactgaaggtgaagtctgataaaatcaaatcggccgcccagttcggcaattctgatcaagtcaaagtcggagaaccggtcattgcgatcggaaatccgctcggacttgaatttgcgggatcagtgacacaggggatcatttcaggcacggaaagagcggtgcccgttgactcaaacggcgacggacatccggattggaatgcggaagtgctgcagaccgacgccgcgattaatcccggcaacagcggcggcgctttgatggatatttcgggcaaggtggtcggcatcaactcaatgaagatcgctgaatccgccgttgaaggaatcggcctgtccatcccgtcaaagcttgtcattcccgttattcaggatttagaaaaatacggagaagtccgacggcctttcctcggtattgagatgaaatccttaacggatattgcgagctaccattggagccagacgctgaaacttccgaaaggcgttaaaaccggggcggtcattatgggtgtcgacgcgttttcaccggccggaaaagcgggtttgaaaaagctcgacgtgattaccgggttcgacggacataaggtcaatgacgttgtggatctccgtgagcgcctgtatcgcaaaaagatcggcgaccgtgtgaacatcacgttctaccgttcgggaaagaaaaaaacagcggaagtcaaactgacagaagcagatcgattacagaaataaaaaagcagcccggacatccgggctgttttttattgatttatttgttaatattatactattgtgaagcagggaggtgaaacacatgaaaacggctgatgtgatcatcgtattgaatgaaatcgagggtgaatgtgaaggaagaattattttagaatgcagaatttaagaaaatgaaacatgtcatattaaacgtcctttttcaggggcgcttttttttatgccttttttcagaagctataaaaaagaactgaacgcgggtcacaacacgttcagttgaaaatggatatatgtagaaaaaggcagacatgaccttagaactttgtgattgaaacagactggtgctgctgaatagcggcagatgaaactgccggcagcttatttgcagatggctccgttttcagcgtttactttcaccaattcagcttagcttccgttttgtttcagataaaagcgaataatagaaggggaagcgaaaaaaataaacacaggctgatacatctaaggagagactgcatcatgaataagttgaaaggcatcaagctgctgagtgcagacggcgagtctgcactcattgattctttaacgatggggcttcatcacggaacggttctcggggaagacaatatcgtcgagacatacattcgttctttgcgcgaaaagctgaaggacaaagaacacaaggtgattcgcacggttcggggcgccgggtacagggtggacctggcatgaaacggctgtacagaaccctgcggttccagctcctgttcaggtcactggcgattttgaccttgctgttatgtttcatcggcggtacacagtacatgtttatgagacggacgatgtatgaaaatcaggcgatcagcattcagagtgatatcaattcaatggatcaaagcgtatggaggtcaatcaaaacccctgcccgttccgaaacaccggctcatccgaatgtgatttatcccggggtgacggttgcttttatcaatcaatcatacaagatgtcagttttatcagaagacccgcacgcgggagccgctccttctttcccgaaaaacgtgtatcgggatgcgctgacagatacaatggcgcttcactatcaggtggctcacaataaggcgggtgaggaaatcatcgtcgtgtttcaggcgatttccgttgacggaaggcaggcgggagttgtacagatgagcacgctgacccagcctctgaatgattcgcttttccgccagatcagcattttcgcgatactttcctttgcggctttggttatcggactgtttgtttttttgccggtgatccggctcacactcaagccgctgtcccgcattgtgcatatgatgggtgacattcatgccggcagtctcgataaacggctgccgattgataggaagcaggccgaaattgagtcattgggcatctccatcaatcagatgctggaacggattgaaaccgcgtttcaggcggaaaaagaagcgaaggagcgcatccggcggtttgtatcagacgcatcacatgagctgagaacgccgcttacctccattcacggctttatcgaaattttaatgcgcggagcggcggaaaagccggagcagaaagaaaaagcgcttcaaagcatgtacgcggaatccgtcagggcgaataagctgatagaggatcttttgtttctcgcgaagattgaccgggagccgagctttgaaatgaaaaaaggggcattgggagacgtcattttggaaatggaggctgagctgaagctgcttgcgagaaaccggaaactcgagttctttgttgatcaaaagatagaagctgtttttgacaaagacaaaatgaagcaggccattctcaatctcttttacaatgcggtgcagcatacggatgaagacacgggtgtcatcaccgtctccctgcagaaagacggaggaatcatgcttatgattgcggataacggaacgggaatcgctccggagcatgtgcctcatgtgtttgaccggttttacagggcggaaacctcccgatcccgtcaatccggcggcgcggggctgggtcttgccattacaaaaaccattatcgacagccataacggaacaattgaagtgaaaagtgagcagggaaaaggctccgtgttcatcatccggctgccgggataaaccgggatagcggaagaaatatcacaatttatatataaattctaaattttcaaaaaataacttgtccttttccaatattgatgataatatctagttattggcaaagggggtgtgtactgatgaagattgaagaacttgatcttgatacagaaacagcaagcttggtgcatcgctgctagtaaagccgtgactcccctttttggggagttattatctttcagggggtatgtcatgatgtcaacggactgtaagcgctggaagtttaaagacagcgtgcaggtgctgacctacacggggcatattatcattcaatatcgaaaggcgattaagcttgcgcatacgagtgagatcaaagaggcggttgaacggctgatcaccggctgtgaaaaacaagagctttctgatcttctgggagaggaagcgggaaaccagtttttcgatgcgttaatgaaattggatgctttaatagagccatggcaaaacggccgtgaaggctgcatcactgaaaagcagctgtaccattttgagaaatacaaccaaaaccccaatctgatccaaaacagattagacggcagcagggcagcgatcgtgggtctggggggcgtcggaacgatcattcttcaaaaccttttggcggcgggcatgcagcattttattctcattgatttcgatgccgtatcagtacataacctgaacagacaattcgtctatactcaatcttctgtaggcaaattaaagatctcagaatgcagagattatatcgcgggtatcaatccccatgcggacgcagcactttaccatcaggaaatgacacagccgcaggacctgcgtgtgttagatccgtacgaaattgatatcgtcataaatgccgctgacaaaccccataacatttctgaatgggtttatcagtattgtaaggagcggaatatcgcgtttatgaccgggggtgtcggcagcttcagcggccaatgggggcctctgctcacgcctgaatcctatcaatccggcgtcacctatgaaaaaaacatgccggccggacttctgaactgttaccccgatgaaccgatcaaaggttcgttaggagcgacaaacggtattatatcctcgtttatgtctcatgacattatcacataccttgcaggcggaagcccgaaatccctgaatacccgcatcggcctggactttgacggacttcatattacagaaacgaagctttctcaaaaggaaagcgctttatgaagacgatgcatcgtacggcgagaaaaccgggcgaccctctgaaaatagaaatcgacacaagcccgatacgcttgaacccattagatacgcaggattacacaagcaagatgatttgcagcattatgtatgaaagcctgcaggacggctataactgccgaatcatccgcaaagatcgccgcacctgtcaggtggacattcacccggactatttaggtgacgccgagggtgtggttcaaacgatcatctatcatctgacaaaagaaaaccaaagtccccatctcggcagtttcctgaacataaaacaggccgttccgtatgtaaaaggcctcgtctcatccgatcagctcggggtgaacgtaacgggcgaaaaacgctttgaagtcaccttggacgagccgtctgatgaaatagaagccgttttgcagagcagctttctgattccggcgaccgccgggggcgatgtgccggaaaatggcccgtaccgattcaagcgtacgtttgagaagggactggaatttgagcggaatccgcaatataaaatgacgcccgcggatcaccgcaccgttcagatcatccaatttattttgaatgatgatctggaaaaaagcatctggctgtacgaagcgaatcagaccgatgtgacctgccacacccagtttcatcattccaacatgaggtatcggcagtatgctgattttaaagaaaatcatttgccgatgttatttaccttcaaggtaaaggacggcatgctgagaactttcattcagcattattttgataaacaaaagctggccggcgatttggggcatatcatcacaccgactgattcactgatcggtatatgggaaagcggacggacaccgcagaaagatccgccccttttgacaaaagaagagccgatccgaattgtttatgccgattattatcccaacggagagatcattgaaaggctgactgaattgtttcggagggccggagcggacgtatccgtctcccgcgtcagtcatttcaatgattattaccatatggataaaagcgggtttgatattgagcttcatttgttcctgccggcttacatgcatgagctgagctatatcaaatatttcattcgcgacatcagcgatccggggaagaaaaaaacgatcattgatgccataggatctgaaaaaaagaaggaactttttgggttattcgagaatacaactcattattgcccaatttgttttgggaaaagtctgtatctgcaagatccatgtatagagggttttagtgtaaagactgacgggctcctttctgttcatgatgttaaatgcagatagctggaaaggggtattcatttgcggaatcgaaatttgctttacttctccggttttttcggaaacttctttttcgaacggggaatttggattttatatttaacaagcatgaattattcattgtttctagtgggcatcctgcaatcggtcctgaatttggcgatgtttctggcggaagtgccgagcggcgtcatctcggacagaatcgggagaaaaaaatcgctcttgctcggtcattttatggtcattgtctatttggtgatgttcctgagcttccataacttcatcgccctcttcatcgctcatattatatacggtatcgggctgacgtttatatcaggaacggatcacgcctttttgtttgattcactgaaagaacaagggaaagaaaagtggtacggcaaatccatcggaaattataacggacttgtcatactcggtcttgcgatcgccatgggcatcggcggctacttgcaggaaatatcatggtcgtatgtgtttatcgccgggattgtgactcagctgattgcgatggcggtcattacacagctgacggagatcaaatttgaaaacagtgaacacgaaacgcagacggtcggggacatcttaaaagaagtcaaagatttcttcaggctgaacaaagcctttaaatatttggtgctgtcactctccgttttctttgcgattacatcggttttttatatgtacggacaagatctgttaagtcaggaagggctgtccgtgcgcaatatatccattatttttgcggggctgtccatcttgcaggcactgtgctccatcttttcttcaaagccggcggaaaaattcacgccgaggcgcgtgcttctgctgacattctgcatcatcggggcggcctatctgtttataccttcgggcagtctgtacgtgacgattgcagcttttgttgtcatcaacgcgctctatgatgtgatagaacccgtatccagtcaggtggtgaataatgagattccgtccagaacgagagccacgctgctgtccattatcagtttgatgacctcgctcttcatgttcattgcctttccgtttatcggattcttaacggactattttgattcagctttgctgctgaccgcaatcggggtattatccatcttattgtcgctgtttatgatgctcagcttttacaaactgaaagcgagcgtcgccatccagaataaagtcgagctttgaaccagaatgacaaagggatgatgtgagttgctgaatattcataatcttacggtaaatttagcgggagataccattttcaaacaagtttctttcttcatcaatgaaggcgaaaaagtgcttgtggccgggccgaacggttccggcaaaagcacgctgttcagggtgctttcaggggagcttgaggcggatgaaggaacgattgcgatcaacaaaggggcgaaggtcggtttgctgaagcagatcgctgatccccatgaggatctgacgttgtatcaatatctggaaaaatcgtttgaagctctcgcggcgatccagaaggaaatgaaggccattgagctgaagctttcggaaccgatgggtgaggacgagctgactgctttattggaaaagtacagtcaatacacggaaacatttgagcggaacaacggctaccagatgcatgcgatgattgacgaggtatgcaacgggctcagcctcagcgaattaaaggatcagccgttttcaaagctgagcggcggcgaaaaaacaaaagccggccttgccgaaattttaatccgcaacgacgacattatactgctggacgagccgaccaaccatttggatgttcatgcgattgagtggcttgaagggtttattaaaaaatcgaataaaaccattctgtttacgacccacgataaaacgtttgccgaccagacggcgatgaaagtgctcgagattgacgataccgaggtgaagatttggccttacggtttcagcgaatacctgaaaaagcgggaagaattcatcatcgcccagtttgagaaatatgaagaacagcagagaaaaatacagaagatgaaggaatccatcgcccagctgagagattgggccaaccgctcgaatccgccgtctgtcgggctgcacagacgcgcgaataatatggaaaaggcgctgaaaaggatcgagctgatcaataagccggtccggacggagcaaaaattaaaaaacgcatttcaggaagcgggcgccggttcaaaagatattgtgttcattgaaaacggaaaggtggccaacggatcttcccttttatatcaaaatgtgaatctgcgtataaagcataaagacagaatcggcatcgtcggcagaaacggcgtcggcaaaacaacgctgatccgctgcatcatcggggaaagagaactgtcggacggcaccattaaagtaggggaaaatcttaagataggctacattgatcaaaagagccacgtcggagattcgagtcagacgattctgcaattctttaaagaaaatctgctgactgaagagggcatggcccggaatatgctggccaagtacggattttacgggtcgtcggtctttaaaaaactttccgtcctgtcgggcggtgagagaatcaggctgaagctgtccatcttaatggaaaaaaagctgaatgtcctgatcctggatgagccgaccaaccacttggatattgaatctcaggaaattctcgaaaacagcctgatgcagtttcaaggcaccatcatctgcgtttctcacgacagaaacctgctggagaagttcaacaagattttctggcttgagaatcaaaacgtcaccatcttttcaggtccatacagttacgccaaacaaaaaaaacggcagattgccgaataaaaggggaatggatatgaccattgacagactgacaatcaatgagttatcgtacgatctttttgtaagcgagtatgctgataagaaaccttttattttgacgggggcaatggatcactgggaatgcaggccgtggacgcttgaatacattgacgaacactatggagacagaatggtcaccatccggaaatcagatatcgaaggggtcaaaacgtttaaacaagtaaagctttccaactatatcgagtacattgatcagaatgatgacaaatggtactgtgactggaattttacgcagctgaaccaaaatgacttagaccttgtctattccgcacccgagtattttacaaaagacacattgagagcggatgaagaaacgggacgggactggaaatggttctttctcggttctaagcagacaggcacgccgctgcatcaggattttaacagcacgcacgcgtggaacggcgtcattttcggggagaaggaatggattttctatcatccggacgactctccgtatttgtacgaaggaaatatcaatgtctttgatgaaaaagatatagagcaaaaaccgctggcgcaaaaggcgtctccgatccgcttcaggcaaaaggcgggagaaatcatttacgcgccgcgccattggtggcatcaagtcgagaatacggaacatacattggcagtgagtgagaacttttggtttaccggagagcggcttgccaatcagatataaacgaaaggctgaggagcacctcagcctttttttgtatggattcatttcatccggtccagaccgaattttttcaggcggtattgcaggctctgcctgctgattccgagctcgtttgccgttttggatatgttattgccttgttttctcagggttttttcgatcatgtatttttcgaagttttccattttgtcttttaaatctgtgccgggctgggtgcttgcggctgctttgctttccgtgtcagcgggtttgattttcatccggtattggtaaggcaggtgggccgccgtaatcgtcgtttcatccgtcataaagttcatggcgccttcaatcatatgttcaagctcgcggatgttgcccggccagtcatactccaggaaaaattgctgcacatcgtcactgatcgaatcgacatgcatttgaaacaggtggttgtttttctgaataaacacttcggccagaggcagaatgtcttccttgcgctcccggagcgggggaatgatcagcgtgacaacgcttaagcggtagtataaatctttgcgcagccgctcttctgaaatggcggtgatcgggtcttcattcatcgtggcgatgatacggacgtcaatcggtttgtcctgagctgatccgatgcgcctgattttcttttcctgaagggcgcggagcagttttgcctgcaggctgagattgagagagttgatctcatcgaggagcagggtgcctccctgcgcctgctcaaataagccgggctggtcgatggctccggtaaaggcgccttttttcgtgccgaataaaatactttcgaccagactgtccggcagggcggcgcagttttgtgagatgaacggggcgcctgagcgctggctgccgttgtgaatgctttgggcgaacagctccttgcctgttcccgtctcgccggccaaaagcacggacgatgatgtacgggttgcccgtttcgcgttttcgatgacttcctgaatgaccgggctgttgccgagaatgctgtcaaacgtgtagctgttctgttcttttctgtgcatgttctccctgatcagccgttcgagcttggtgacgtccttggcgatttccacggcgcccttgatctcgccgttttgcacaatcgggaaggtgtggttgatcgtcgtgatttcctggcctttgttattgaaatagctctgctttacatttttaatcgttttgccttcttgaagggcctgaacgagcgtgctgtcctgctgattggaaaacataaatacatcagtcaggtttttatgcaggacgtcccgttcatccatatcttcaatctgcatcattttcttattgtaaatgacggtgctgcccttctcatccaccacatgcagcccgacatcaatctcttccagaatgctttgtaacacgagtgtgtaaaattcgctggttgtgtgcaggtcaattccccctctcaatcgtcttaacattcattattttaaaataaatcgaacaggaaacgcaaaaaaattttgcgcttggctgaagtttgcacgcaaactgccggaatattttgcaggaaaagaaagaatgctggcgaaacatcccgttttttcggattggcacggaacttgctttataaaaagggaaagcaagatctaatgttgaatgattacaaaacaagggggaatcagattatgtcagctttcacaaaatctcaagaaattatcagtcaaacttcacattacggcgcgaacaactatcatcctctgccgattgttatttccgaagcgcagggtgtttgggtaaaagaccctgaaggcaatcaatatatggatatgctgagtgcttattccgcggtgaaccaggggcacagacatccgaagatcattcaggcgctgaaggatcaggcggataaaatcactctgacgtcacgcgcgttccataatgatcagctcggcccgttttatgagaaaacagccaagctgaccggaaaagatatgattctgccgatgaatacgggggcggaagccgttgaatccgctgtcaaagcggcgagacgctgggcatatgaggtcaaaggagtagcggataatcaggcggaaatcattgcgtgtatcggcaacttccacggcagaacgatgcttgcggtatccctttcttcagaagatgagtataaacgcggtttcggacctatgcttccgggtataaaattaattccatacggggacgcagaagcgctgcgccgggcgatcacgccgaacacagccgctttcttattcgaaccgattcagggagaagcgggcatcgtcattccgccggaaggatttttacaagaagcggccgctatttgtaaggaagaaaatgtgcttctgatcgctgatgaaattcagacgggactcggccgcacagggaaaacattcgcggttgattgggaaaatatcgtaccggatatgttcatcttaggcaaagcgctcggcgggggcgtcttcccgatttcgtgcatcgcggcgaaccgtgacattctcggcgtgtttaacccgggttcccacggctcgacattcggcggaaacccgctcgcttgcgcggtatcgctcgcatctcttgaagtccttgaggaagaagggctggcagagcgttcccttcagcttggccggtattttaaagaagagcttgagaaaattgataacccgatcataaaagacgtgcgcggacgcggcctgtttatcggtgttgaactgacagaagcggcccgcccgtactgtgaaaagctgaaaggcgaagggcttttatgcaaagaaacacatgataccgtgatccgttttgcaccgccgttaatgatttccaaggaagacttggactgggcgatccaaaagatcacaaacgtgcttcaaaacgcgtaataccttgatgcggcaatgctttccctcggcttgtatggaatttacaaataaaaaattcagcacactctatttgcgcggagacagtattttagtataatgtatctttatgtacgaaaatgaatttcatataacattcatatacaaatagaggctctttggacagcaaatcggtttcaaagcaccggcttggttccaatacaagttgctgaaggggtgcagaatagtgaatacaaatcaaaaagagaatcagcttcagcgcacaatgaaatcgcgccatttgtttatgatttcattaggcggagtgatcggcaccgggtttttcctgagtaccggatttacaattaaccaggcgggaccgctgggcgcggttctgtcttatctggtcggcggttttattatgtttttgacaatgctctgcttaggcgagcttgcggttgcccttcccgtatcagggtcgtttcagacgtacgcaaccaaattcatcagccccgctttcggtttcgcattcggctggctgtactggctcggctgggcggtgacatgcgccattgagtttttatctgcgggacaattgatgctccgctggtttccgcatgttcccgtatgggtgtggtgcctcgtgtttgtcggactgatgtttcttttgaacgcgattaccacaaaagcgttcgctgagtcggaattttggttttccggcattaaaattttagtcattctgctgtttattattttgggcggtgccgccatgttcggcctgatcgacatgaaacacggcgagcaggctcctttcttctctcatttttatgaggatggattgtttccgaacggcattaaggctatgcttattacgatgattaccgtaaacttcgcgttccagggaacggagctgatcggggttgccgcgggagaaagtgaaaatcccgagaaaacgattccgcgctctatccggcagacggtatggagaacgcttgtctttttcgttctctccatcatcgtcattgccggcatgattccgtggaagaaggcgggagtggtcgaaagcccgtttgtcgtggtgtttgaacaaatcggtattccatatgcggccgatattatgaactttgttatcttaattgcgctgctctcagtggccaactcaggcctgtttgcatcgacgcgtatcttatatgccatggcgaacgaaggacaagcctttaaatcgctcggcaaaacaactaaacgcggcgtgccgatgaacgctctgatcgtgacgctggccgtcgcctgcctgtccctgctgtctaaagtggcagcgccggaaaccgtttatatgtttctcttatcattagccggactaagcgcgcaggtcggctggattacgatttccctgtcacagctgatgttcagacggaaatacatccgcgaaggcggcaaagtggaagacctgaagtttaaaacaccgctgtacccggtgctgcctattatcgggctgacgttaaatacggtcgttctgatcagtctcgcatttgattcagaacagcggctcgccctttattgcggcatcccgttcatggcggtgtgcgttatcgtctatcatctgtatgtaaaaaagcataagcagtcagaaaaacagatagagctttaaatcttttcgtgtccaagtcatctttgagaaacccgcacaggacaacatacaacatgttgaggtggaaaaacggatgaacaagaatatctcagttattggaatgccgatggatttaggacaagcacgacgcggagtggacatgggcccgagcgccatccgctacgcgcatctcattgaacggttatctgacatggggtatgcggtggaagacttaggcgacatccccgtcaatcgtgaaaaactcaaacatgatgaagagctgaaaaatttgaactctgtgctctcggggaacgagcagctcgcccaaaaggtggacagcgtcattgagaatgagcggttccctctcgtcttgggcggcgatcacagcatcgcgatcggaacgctgacaggaacggcaaagcactataaacagctcggcgtcatctggtacgacgcgcacggcgacttaaacaccctggaaacatcgccgtcaggcaatattcacggaatgccgctggccgtcagcctcggcgtcgggcacgacacgttggtgaatctgggcgggtatgccccgaaaatcaagccggagaacgtcgtcatcatcggcgcgagatcgcttgatgaaggcgagcgtgaatacattaaggaaacaggcatgaaagtctatacgatgcatgagattgaccgcctcggcatgacaaaggtcattgaagaaaccattgactacctgtcagactgtgacggcgttcacctcagccttgatctagacggccttgatccgagcgacgcacccggcgtaggcacgcctgtcgtcggcggcatcagctaccgtgaaagccatttggcaatggaaatgctgtatgatgccgacatcatcacttcagctgaatttgtcgaagtcaacccgatcctcgatcacaaaaacaaaaccggcaaaacagcggtcgagctggtagaatctttgttaggaaaaaaactattataaaatatgcgcctccgcacctgcggaggttttttttgttgccacgaggaaactagcgggctgccaccctctttttggacctgtaaatatgatatatttattacacaaaatgggaaagggaggtgtcctgacagatggctgaggtgatggcccacgaaacagttgcgaaaaaaatcagtgactggtatgaggaaatcaaaaagcacaacactgaatcggctgaggcgttaagagaacaactgcttacggatctgcaaaatatgacacaaaatcaaacggtgctcctttattttaatttaattgattcccgctataagcttttaatggaagagtatgagaaaacagacggcattttaaaaacgatccagctgaacgccgataaagaaaaaacagaccagatgattcaatactattattatttcttttccggaatgcacgagttttaccgtaaacggtttatgaacgccattaatttttaccggattgctgaaagcaggctccggcacataccgaatgagattgaaagagccgagtttaattatcaagtggcgattgcctactatgaaatccgccaaaactactttgcgatgaaccacgcggaaaaagcgttggagatctacaaagccaatgaaatgtacgcggtcagagaagcacagtgtttaatggtgatcggctgtaacagaatggacttgttccactatcagaaagccgaagagctcctgcagacggcggttcatcaagccgccaaagcgggcgatccgcatattgaagcgctcgcccactttaacgcaggcatttgctatgaaagacaggaaaaactggaagaggcgcgggtcgagtttgaaacggctcttgatcaaaaggagcatttgcgatcagcgtattcggtgcggagtctgtacatgctggccagagtgttattgaagcaggcaaagacggatgagggccgattttggctgcataaagcgctgaatgccgctgaagaaaaaaacgagcccgtatacacccaaaagctgcgcatcttacagcatgtctttattgaccgcaatgaagaagcgcttgaatcagctttcgccgagttaagaaggaaagagctgtggagtgacgtttccgatttgtcgtatcaggccgcggcgcattttaaaaaacaggagaaatacaaaccggcggcgaagtattttcaggaatcaattgatgccaatgaccaaattttgagattaacggaggggattcgtaatgaaaacatgtaaattcattgtactctcagcagccttggcaagtctcatttcgattggattatttgcacaaactggttcaacggcacaagccgaacaaatcataaaaccggcggaaaacggagccttcggataatactgcatgatatcgctttcgtgtaaggagtgattcaatggctatcacgctgcagccgatgacaggacaagagtttcagtcctatctcgctcattcaaccaagcattacgctgaagaaaaggtaaaagcgggaacgtggctgcctgacgaagcgccggaattagcggagctgacgtttgaagacctgcttccagacggcttggagacagccgatcactatttatggacgctgacattggacggaaaggaaaatgccggctggttgtggctgcacgccgatccggaccacccgcagcaggacgcatttatttatgatttcggccttcatccgcctttccgcggcaaaggctatgcaaaagaggcgctcgcaaggctggaggacaaagccaaagatctgggtgtccgcaagatttctctccatgtgttcgctcataacgaaacggcgcggaagctgtatgagaagacgggattcctggagacggatgtcattatgagcaaaaagctgtcatgaaaagaggcccgcacgatgggcctcttttgttattcatctaacaatgtcatcatttgttccgggtaacgctcgccggccgccgtgccgatcggaaacatttcatccaaccgcgccttcacatcctccggaagcacaatgtcgagagcggcgaggttctcttccaagtagtgtttcttttttgtacccggaatcggaatgaggtcatcgccgtttgcgagaacccatgcgagcgcaagctgaggcgcggtgatattcatttcccgggcaatggcggtaaatttttggacgagccctatattcaccgccaaattgtctccctggaatctcggcgttcttcttctgtaatcatcggcatccagctgatctgtcgacgtcatctttccggaaagaaaacctctgccgagcggactgtaaggcacaaatgagatgccgagctcacggcaggcgggcagcacatgctcctctgcttccctgctccataaagaatattccgattgaagcgcggcaatcgggtgaatgcggacggcgcgcctgatcgtttctgcggaagcctctgacaatccgatatacctcacttttccttcgtcaatcagcttcttcatggcgccgacagtttcttcaatcggcacccgcggatcaacccggtgcagataataaaggtcgatataatccgtcccaaggcgtttcagactggcatcacacgcttttttcacataatcgggccgtccgttgatttcgataaactcacccttttcgcttcggacataaccgaatttcgtcgcgaggcacagctcctttctgaatggggcgagcgctctgccgacaagttcttcatttgcacccaatccatattgatcagccgtatcaaacaaattcacgccgagatgaacggcatgatgcagtgtggagatcgactcttcctcactctggctgccatagtattccgacatgcccatgcaccctaatcccattgcggaaacccgcatcgaaccgatcgttctgtccttcatatgtcctccccctttcttgtatgataaccagatttcctgatatttgaaaatgatttatgtatatgatttacatattgttataaaatttttaaaaatctgtaaattgtatatttttttatcacaatttcgtcatataatgaaaacgtggaaaaattaacctttgagaaaagaggcgaagtcaatgtgtaaaaagctgttcaaagccgtcctcccgtttgccctgtcattcaccatggttctgtcgttctccggtttgaatgtaaaagcgaaagaaacagaaataccacgctacgcaaaagaaatcgcagaccttcagcagggcacgactcctcaagacgttctccaatccgccaaagagcttgccaaacagaagcacgtttcaacagaagcaattctcaagcagtttcatcaagaaatcacggcagacaaggtgcaaggaaatgtaatcgcttccaaagacggactctctgcgatgggcggatcgtcaggaaccaaaaaactcccgaaaagcacaaaaggcaatatttattacacgaactcatacacggcttattacaatcacgggcatgtcggcatgtattcatccgctgataaaattgtcgaatccgtgccgggagacggcgtccgtcagattgcttataacggcagagaagtcgaagacaattcaatcgtccagaccgtgaaagttaccgatgctcaaaaacaagccgccgctgactgggccgtatcaagagtgggtgatgagtactccttcaacttcgtcaataacagaaatacgggccatgaaggcgccaaaaactgctcaaaactgctgtggtcggcattccttttaaaagcggggattgatatcgactctaacggcggcttaggcgtatacccgcgcgacatcacaagctcgtcctacacaaccacgatcctgaccattcactaaggagaacaacgtgaaaaaaatcatctggatacccttagtgatcatcgccgccgcagcggtcttatgcttcttctatttccgcacggaagaccctgcggaggttgcgagagacacattaaatgaccctgattttctgaaagataaagaggcgttgctgtatttctccactgcggctgaccaagacacgttcggcggcggaaaaagctacgccctcttcgccgatgaaaaagggcggctttcttcttatcaaatgaaggggcttgagctcggatcggccaaagtgcatgacgaaagcgtgctgctggaggacaaaaaaggaatctacaccgttcaggacggccttcacacgtataaaagagcgtaccagcatacgggagacagcgcgggatatatcgaacgggcgaaaggcttttacacgctgtataattcgggctacgacaagagcggcggcagctatcgctcagagctgtaccgccagatggacggcaggtggaagcaagacgtcatcccgcactatatccgcgcctcaggcttttttaaagatcatcttttcgcgctcacgccgacagatgacgaaaaaggctatcacgtccaagacattcaggccgataaagaaaagctccatacaacatcaatcgcgacgtggacgtataaagaaggcacgtctgtcgaatcccagctcgccgtggacgacagcgctgtctgctttgttaccagaggagaaaaagccgatcacatctatcaaatggtgaaagtcatgaaaaacagcggcgccatcaaaacgtatgacatcgccgcttataaaaatgacgaacagacgatctatgactccatgccgttcagcttcaaaaaaagctttttcatggagcatcgcagcttctatttcgttgacggcttcggaaccgtctaccgcatcaaccctgagaccggaaaaagcaaaaaggccttcaccctccccgcatcacgaatgaaggccgacttcaaggagctgacccatcaaaacggaaagctgtatctgttcacgtacagctacaaaaagcccgccaaaatcgaatccttcgacctgaaaacgggcaaaaagctgaacgacctgaccatcccaaacttaaaaaacatcgtcacgccgaaaagccatctcaagctgtatgatgtgcaggtgatggatgggttttaaagagtatgaacatttcggaagagcttgccgcttttggtaagctttttataatgaaacgttactgcgggaaagaaggtgttcatttgaaatcattcagtatcttcttattgttgtccgtcatttgtataaccattgtttttgtcataatgaatatgttgattggataccctgatgtgagtaacggggcattgattatgattgtatatatcgttgtgaccctcatgataaggctatatagcaagaaaaagaaatagaggaatttgaaccgtaaaagcagaagacagtcagatgaaggagggagccgatgaagaaaaagcttgccgcggtgaccgtcaccattctcctggtttccgtgataaccaactcttttttaaacggcggaaagccggactggattgatgtatgctgtacgctgctggcgtgtctattaggaattctgttcgtccttcgcttagaaaaaagagaaaacacgtaaagagccggatgctgaaaacaccggctctttttgcgcgtgatttgccgaattgtggataaaactcagcccgaagcactactaacatgtgtataaataggttatattgaaaagagaacaattgccgcgcgcaaaagaaaaccggaggatgtaacaatgaaaaccgcttattattcttgtgaagaacatatcgaaaccgtgctggacatgtacatagatgatcatgagcttccgcccgaaatcagaaaaatcgaacatactaacagtttatccacagcctgtgaattatgtggggacactgcaacatatctagtagggaacgaatgatcctacacaaaatacagaaaagatatccacaattgtggacaatatatatgaataacttgtttctaaagtggggatgacctgtgaatatcaatattgtgaccatcggaaaactaaaagaaaaatacctcaagcaaggcattgaagaatacaaaaaacgactctcagcctacgcaaaaatcgacatcatcgaactcccggacgaaaaagcgccggaaaacctgagcgaccaagacatgaaaatcgtcaaagacaaagaaggcgaacgcatcctggccaaaatcagcccggacacccacgtcatcgccctcgccatcgaaggaaaaatgaaaacatccgaagaactggccgatacaatagataagctggcgacttatggaaaaagcaaaatcaccttcgtcatcggcggctcactcggcctaagcgacgccgtcatgaagcgcgcagacgacaaactgtcattctcaaaaatgacatttcctcatcagctcatgcggctcatactagttgagcagatttaccgggcgtttcggattaatcgtggggagccttatcataagtgagtgaggtttgcaaataccattttcttgatgtattcagcataaaaataatcgttaaggatcatattttgttataatatattcatatggaaatattatgaatgaaaggatgaccattttggaaagaaaaatagatttacttatgaactcgcgtttcggggagagggtagccgaagaggatgagaatttagcatcgtattttgttgaaacggcagtatggaatcaattgttgatgggggaaattgatgtagtccgaggagtgaaaggttcaggtaaaagtgcattatatatgcaattattaaaaaaagagggtagttttgctgcgaaaaacaccttattaatacctgcagaaaacctagagggcacacctgtttttaaatctgttcttggtgatgctgatttaactgaaacctcgtttcagtacctatggtctatctatatcattactctgataggtgataaaatcaaagattttcgtaatagaagcgaagaagtaaaagattttattagaagacttgaattagaaggtttattagaaggtaaagggataagacgtctccttacgaatgttagagattatgtttttgaattctttagaaatgtaaaagaagttgaaggagtagtaaccgtagaacctacaactaatatacctattttaaaagggaaaatctctttaaatgaaccaagtaaagaacatagagaattaggagctatatcaatttttgaacttcttgaaatggctaatgaggcacttaaaagtgttgacttaagcgtttggataacatttgatagacttgatgtagcatttcccggaaaacctgaatttgaaaccttagctctaagaacactttttcaggtttacaataatataaaactgcacaaacatataaaattaaaaatctttattagagaggatatttggaaacgaattactaaaacgggttttagggaggcaagtcatataacaaagcaagtgacgattgattggtcagaacaggattttttacatttactggttagtcgtattcttgaaaacgatattctttgcaaattttttaatgtggaaaaagatgatgtattaaaagatagtgacaagcagaaaaaaatattctattctattttcccgaaaaaagttgaagtaggaaagaatcctgaaacatttaaatggatgattggacgggttaaggatggattaaaaataacagctccaagagaactcattcatttaatgaatgaggctagggcaaaacaaattaaattgttagaaactggtactccagaaaactcttattcagaaatcataggacgaagtgctttgaaggacgcattaaaagtagtatccaaaattcgtttagagcaaacaatttatgcagaatatgcacatctaaaaaaatacatagaaaaacttgaagaccagaaaactgaacatgatgttggtaccctttcaaaaatatttctaataaacaaagaagatacaataaatattgcaaatgaattagtgtctattggattttttgaggaaaaaaagggtagtcataaaccttattggacaccatttctatacagagccggacttaatatggttcaaggtaaggaagactaatattatagagataagagtaaagggggagtataaagcttccctattaattttttatgcttaagtaactctatattagatttaaaaaaattcacataaagctacatcaattctcaactgtcattagtcttaattaagcttgttaccatagggatgtttcgaagactttaatcaaaaatgattcaaatctcacttagatagagactatgataaattttatattatttaagtcgtcatttaattaacgtttattacaatagaaatataatctatagagggtgttgaaatttgaagaatgacattttgttacctaataaaattaaagtttttataagttcaaggtgtggacaaggttttgaaaggtatgatgaagtaagaaaacaactaaaaaaacttatcgaatcgacaaagattgctgatgtatatctatttgaggaaagtggagcttcgacacagtccgcagaacaggattatttatatgccctagatgatagtgatgtatgtctattcttaatagataataaagatgatgttacatctgcaattgttagagaaataactagagccaaatcacacccaaaaaagtcaatatatctattttgtaatgaaaaagaaagtaaacctacgcaaatccaagaagaacttattggagcaaaaggagctaaatattatatagttaatagttttaatgaatttgcaaatcaaggatttaaagatttaataacagacatatgtaatatttatagacactattgtaaaaatagactcatagaccaagaatttcacaattctgaacagaataaaatagaaataggttcaatagcttctgaatcactagagaaacgtattttacaaggaattgataaatcaaaagcatatatcggaaaaaagatattttctgttaataaagaagtgaaagaaacgagtgaattagatagattttatgagcaatttctaaaagtattatttggtgaaaaaagtattgaagaattcaatggggatttatttttagagcaaataaaaaaagagcaaagtgataatatgcatctagtagtaaaattaagatggaaagctattcagttttactggctcgatgattttgattctgtattaaaatacttaaaggaagcttttgacttatgtaaggaaagtgggttgcctgattggatttcacaggatatactgatagatttaataaatatagaaaatcaaaagttaaatcaggaaaataaattctcctctaggaatgctgcacaagaagagttagaaagtatgcgtcaatctctgttttacccatcaattgatagatatgaaaagctattatataaagaaattaataaagcatcaacaaaaaagaaaactgaaactgtgtatactgttaaccttggtagtaatttagatgtttatattaaatatttgactaacatttatattgttggtgcctttaatggatctttaactcaattattattattgagaaataaaataaaagatatatcatttcaattatgtgaggaatattccaattgggaattcagagtgttgctgttaaaaatggcagtaatagttggagatagcaagcaaacagaaaatataatttcctactttaatagcatattaggaaaaatcaattatattgatgtaaaaaatatttataattttacaaactgcctcccggtaaaatcagaaagaataaaatctaagctagaagtatttaaacatttagggtattattttagcgatgaagattacatgtgtatcaaaagagagttattggaagagattcataattatattgataatacttttatagtgtctatgggaaaattaatatttgattctttgaaagaaaatatcaatagaatcgaagccgatgaaatatctagagtatgcataaaaattttagaaaaaaagatgtttcgcttttatgatgatgctttaaatttgataggaataataagttttaaagggatatctactcaaaaccttgaaaaaataaagaatttgttgaaaggaatcattttagattctaatctagcaaaccagtgtcataacctcttatatgcaattataaatttaagaaaacagataatagcgggtacttcggaattaaatcaagttgtattaagtaacatgtctgaatcagatcgcaaaatttataatttagaaacatctagtgtcaaaagagaaagccatattatgagttatgttcaggagatcaaggaacaaattgagaaacaaggtaaaaatgggatttacagtgtgaaagcgcaaaacccatatctaataatccaaaatatcattaaagagggttgtgaaatagttgataactatctattaaatgaagttcttcaagtatgtaatgaatcgttatgtgcaactaatctactgtattctgataaggtgagtgctttacaattaactatttatattaaacagaatttccaaaatattgattataattttaaagatttatatcaatatttgattaaacacgaaaaccatctctttgaaggaaaagatgatctttttcaaaaatattcgacattaaccgtaaagattaattattttatgcttaaaatggtatgttgccaactagataatgttgatttattaaatctattaagtgaaattaataatgaggatgagtttgaaaaaatccaatgcttaaaggccattataaatgctataaataatgaatcatttaaaaatatagaatcagatattcgtagtatcattattcaattcactttaagtttgaagaatgacaaaaatcaagatatacggtatttatcaattaaagcattgctaaaaatgataacaaccaaaactcaaaaagttatactgactcagctttcacaatctatggattatgaaaatgtatatataaaaaatcttataataggaaactttgaaaaattagcaattatagattccaaagttaataatttaatattgaagaaagcttccatagataatcattatttggttaggacagaagcacaaaaatatatacagactagagcaattaatattactcaataaacttgtttagaaaaaaagagataataaatgtgaatcaaataatttactttcaaatttgaaaacaaattattaaggagtaaatacatgaaagaagaaatgattttaagaaaggtgatttattttttatcaacggcagaaacaccaagggaagtatttttagtatggaataagcacaaggaacatttaaaatactttaagttgagtataaacctagataattatgataaagatactttcccggttggattgggagaattggtaaatgcagttgatcaagactttatttcttactttcaaaccggaaagttatattacatggatgatgaattactgaatgatatgttatttaatggaagtatatcatttcctattgactattctgtgatgttagatactaattatgctagttatattcctcgctttttgaacaatcaagggagtagtgaatttgagaaagaaagtatttacaaaactatagatactctactaaaacataaatttcattatgattataatttctatttagtagaaaattataataaaattattaaagataatgggagttttgatgcttctataaaaaaacatagggatatgtacgagaatttagtatttttagagctatttaaaagcattgataatgatatatacataaataagaatattattgaataccaaatttcgaagtttgaggctatccaaagagtagacgatataatatataaattatataaaactagggatggtaaaagttcattaaagaagttcttagatatgcatcagaatttaacattacttctgatcggaattatcaaaatacagttcagttcaaaaaaaaatgcaaaaaataaaatgattaagttacttgaatatgtccaaaataaagtaggaatttattatgaaagagaaatggttattgcgcttaaatatttcaagaatcctaaatctgttgggatatttaataaaattaataaaggtggtaatcaaaaaaaattactcgaaaaaattgaaaacacagcttgggattttatggctccgagggtaatggaatatttctctaacttgaatagtgaaggaagatattttataccatttttcttatcccacgacaaaaacttgagagagcttttaactttatttgaaattaaaggggttttacaagatattagaacgggtcagttaataccattcacaaaaatctcaagtgctgagctctttaaaaatgaaggagtagaaatagatctttctttctattctcaggaatccacaaataaaagacgattaatatatgaaaagaatattaacgaaggttttagaattctgcaagatgaattctctgagttgaatgacataatgaattaattggagcctctctatattattttacatttaatttttatgttattttatatagcatgttaacagacctaggtataaaacgctggttttgttaatccctctgtgctgtataggcaataggataaacacattattattcctttgcggggaagttatataaatgcatttgctaaaagtgaatttaaagtgattattctactaaccgtacaagaaaataatacccatatcgcagtaaactgtgacggctaaatatttctagggagataaagccttgagtttaatcaatcggatgctcttatgtcaaaggaaaatactttttatataaagactcggtaaaccaagatcataagtcccgattatcttgtatagcaggccgatttgttgtcaatattcgatttactatgaaatcacttgttggcttatagtgaacaaaacaaaaaaaccagatccactaaaatctggttccccacagctgattagaagcaacctactgttgcttctctttcaccatctttataaagagaaagaagacaatgaatacaataaaataattcaatggattcttaacgatacttatctccagcgaaatctgtaagagtatccagagaatgaagatggctagtattgaaggaatgatgattttgtacatgtcgaccaccttccatagttagtaaaagaaaggggcgcgggccctttttttttcatgattaaaagcaagatgcggcagctcccgtcattgcaccgccaacagcgccggtaattgctccgacggcacccgctcctactgttccgatgccgggtattgtgactgttcctacagcagctcctgcaagacccagtgtgccgccgccagttaccgcaccgccgccagtacctagaatacatttcccgactgattgggtgctgattgacccgcttgtttttccagcgtctttgtttacgactttgactaaaacgccatttttgattttttcatatttcagtgtaacggggtcaccatttttgtcagtagagcttttcggaagagcctgctcctcgcccgttatgttgtcttttagggttgcattgcctttagcgtcaatatgaacatctgcatgattgaacgtcatcttcagctcactgtcgttgaggttttcaactttgtatgtagcttgggaacctgcggcagccgcagcatgaggtaaaaccgggagggcaaaggcacctgctaggaataccaaggctgccagtttcactgcggttagcttcattctgctttgcataattgatcctcctcctttggttgccatactaacaaaggcattctgcttgttaaagccttaccatataaaatgataaaaaattcacccaatttcatcacattaaccaacaaggtttgtatgtttcccttcgaaagtcataggagagcagggttcatatctgatgcgaagttatcaaggaggatagaaaccgtaaagaagagctcagagaagcacctttattgcgaacaacagcttcttccgcattttccacacgacagtataaatccctttccgtcacggaaacctagtggaaaaggtttctgaaaggaggggcgtatgatgaaaagtgaaaaaattcaaaacaaaacatctttggtttggaagatggcgattgcctctgcggtttcttgggaagcggcaaaactggcgggctctgatcacccctatttagcgcctctgtctgttatcttatgtttgcagccaacgatagatcagtcgattcgtttttcttttcatcgtattgcgggaactgcgattgggatcatgctaacgtcctttcttgtcagtcacttgccaatgaatggctggatgctggggctgttcctattaggcgggacttacattgcaaagtggttacgaatagatgtaacggttctgcatcaggtagcgctcaccattttattggtctttacgtttgaacgaaactctaaagattatgcattcgaccgaatcatcgatacggtgatcggcgtcatcatcgccattctgattcacatgttcctttttccgccggactacacaaaaaaggcagcggactcttttcaaacattggcccgtcagctttccgacgcactttcagacctttccaaatgggtgcaatcagagtggggacaaggaaaagggaaccttatggaatataaaatgaaccatcttctgcaggagctgcatacggcaaaagagatgctgcaaacagcctctgacagcttaaaattcaaccccgtcagaaaaaaacataaaaacatcatttcaagctatcaaatagagatgcaaaagttgaacgccggatttgagtatctgtcaaatatagtgaaaacgttaaaagaatgggaaaaagaaggagctttatcttcaagtgataaaagggagctggggaatgatttacaagtgttaagtgaatacttttcggatcttaaaggcatacagcagggtgaaacagacaatcggaaacagaaggaacagaacgtgttattggaatctctccgctccgacatgctgtcgcacccgccgcccggtcataaggtctataaagactctttttttttagaaacgaagaaattgctgaagcgtttgtaatgttttctggaaaaagagaatacggatatacagatatgatcaggtaaaagcgggggacatgagatggatgatatacaccggattttggatgtcatcgctaattctaagaaagctaaggtactggctaccatcattcaaacagaggggtccgcttataagaaagaaggggcttcgatgttgattttagaggataaaacaagagtcggaatgttatccgccggttgtctggaagaagatctcgttgaaagggcagaacaggtctggtctgcgggagaaccgttgattgtccgctttgatatgagtgcggaagacgatttatcctggggacagggcattggctgtaatggtgttttgacggtgttgcttgagcctgtaaaaggggaattggaacggcatctgatgacagtcaagacatgcttagatgaaaaaaagtctgtgacccgaatgaagcgattcactgaaacgttagagccgaaggaagatctgtatatcgctgaagacggcagcgtgtttggaaccggggatgtgatggaacaaggccgtattcaaaaactgagacagacggagaagggaatcaaaagggatgaacatacatctgatttgttttttatccatcagatggtgccaaaaccttgtttatatgtcttcggagcaggagaagatgcgaggccgttagtttcgttggcggctcgtgcgggctttcatgtgacggtgattgactggcgtcccgccttatgtcatcacggccattttcctgaagccggccatttgataacgggagcgcctgaagaagtcatgaaaggcctgagcatgacaaaaagggattttgttgtcattatgacgcacagctttcaaaaagatcagatcattttacatacattaaaaaacgagaatgtgttttataaaggcgtattaggcccagaaggcgtacggagcggcttttaggcgggggtgagattccggaagatatacattcccctatcggacttcccatcggggcacaaggccctgaagagattgctgtaagcattgtcggcgagatgattcaaaaaatgcgaaaacaaaggtctcgcctatgaaaacagcaggcatttacctggcagccggtacaagcagacgcatgggaacggataagcgaagtttatttctcaatggcgtttccctcggaagtatggctcttaaaaatgccttgttatctgaattagatcatatttttgttattacgagaaagggagattcactgcattggctttcggattttttctttttagatcccatgtcaaataagtggagccaggcagaatgtgagcaagcgggtaagggccaaggccattctatacaatgcggtttgcaaaaagcggcagcgtacgaggctgacgccgttatcattctccttgcagatcagccgtttgtcaccgcagatatcatcaatacgttaattgattcctatcaaaaagagcgccgttattcatttatcgccgctgaaaatcagcatcttcctatgccccccattttattctcaaatcaatgtttcccggtattgcatcagttaaagggagatcagggcgcccggcatgtgatccgtgaaagtatgatcaatatgggaaaaatgatcagctttcaagaccctttgcttttttatgacgtcgatacagttgaagattatacgctgctgctgaataaattcggggagtgaatgagttggagtatatcgggaagagtgtcattcggaaagaggcccttgaaaaagtgacgggtaaagcgaaatatacggatgattttcaagaaacagggacgttgcacgcaaaaatgctgaccagtccatatgctcatgccgatattgtgtcgatggacttttcagaagcttggaagattcccggcgtgagagcgatattgggggatgaaccttttccgcttgcaggtgaagaaattaaagacagatcgccgattgcttataaaagggtcagataccatggtgagccggttgctgttgttgttgcggaaaatccgattacagctaaaagggccgcggatgccatcaaagtatcctataaacctcttcccgtcgtcaattccccccgtgaggcctttcaaaaggatgcgccgctcgttcatgaacatgcggaccgctatgagaagacaaaaggtgtattcccggttccgaagacaaatatcgcaaacgtggataaggttagaaaaggaaatattgaagacggatttagggaaagtgatgtgacagcagaattccagatttcctttaacccttctgatcacgctgcgatggagacaagatgctcgatcgctgaaattcgggcggatgaggagattatcattaccacatcctctcaagccccttttgccattaaaaaattaatgcagtggtattttggaattgaacccggaaaggttatcgtcaaaacgcctttagtaggcggggcgtacgggggaaaagcagccgttcagttagaggtgattgcctatttggcatcaaaagcagtcggaggccggcccgtcaaattgtttaatacgagagaagaggatatgatcacatctcccgttcatgtaggattggatgccattgtcaaattaggggccacaaaggatggaattttaaaggcggcggacattcagcttttatttgatggcggagcatactctgataaaggagtggacatcagccgggctgcggtggttgattgtacgggtccgtacgctatcgaccatatatcgtgtgattcatattgtatgtatacgaatcatccatatccaagtgcattcagaggctacagccatgctgaagtgttatttgcttttgagcggacgatggatgtattggcggaaaagctgaacatggacccgttagaacttcgctataaaaatgccattcgccccggtgacaccacaccgactcaagttcttctcaattcaagcacggtcggaaatgtaccgaaatgtattgaaagattgaaggaattaatgaattgggacgagggacagcgaattgaaatcgacggccggaagatacgggcgaaggggatcagctgtatttggaaaacctcaacatttgatacaaatgcaacgtccggagtgattttaacctttaatcctgatggaagcattaatttgatgtcagggatagtggagattgggacagggacaaaaacagtgttagcccaaatcttagcggaacgaatgaaaatggatataagcaaaattcacgtaaaaatgcttgtagatacacaaacaacacccgagcattggaaaaccgtggggagcagagggacgttaatggccggaaaagccgtactgaatgcagcggaggaagccattcgaaagctgaaggacgcggcatcatgtgtgttgcgagttcctgtcgaggaattggaagtggccgacggaaaggtttattttatagatcatccttctgtacatgttgacataaaagacattgcttacggatatacgtttccgaatggaaataccattggcggccaaatcattgcgagcggcaattacacattaacccggatgacgaatttagaccgggaaacgggaagaggaaagccgggacccgaatgggctgtaggtgctcaggggattgaagttgagttggataaacgggattatacgtaccgaattacaaaagcctattctgttgtggatataggaacagtattgaatgaaaaagctgcaaggggtcaagtgatggggggatgagtatgggaatcgcattcggaggaagagaaacctttgtatttgattcatatggcagagtattaaatcctcagcttagaacataccgcccccttcactatggagagcagcctgaatatatcattgaatttgttgaaaccccgcatgtgattgcgccttatggagcgcgcggcggcggggaacacggactgctggggatgccggccgcattgggaaattgcctttccgccgctttaggtgtccaattgaatcaacttcctctcattcccgaacaattatggaggacgcaagaggggtggaaagatgataccgtttgattttgattattttaaaccgaagaccattcaagaaacaatcaatctatttcactcgcttgcggccgaaaagaaaacaccaatgtattattccggcggcacggaaattatcacgttaggaaggctgaatatcatctatacggatgcggtgatagacatgaacgcgcttccgggatttcaaaccatccgcttttatgaacatgaactggtgatcggagcgggtgtgtcattaacgaaactggaggaagaaaatccatttccgctattaagtaaaacagtaagtgaaatagccgatcggacgactcgaaataagatcagcctgggcggaaacatttgcgggggcatctactaccgtgaggccgtgctgccgttgctgatttctgatagtttgctagggattgcagggagagcggggattcattaccatcctataaataaagtatttaacaaggaaatacaattgcaaaaaggtgattttttatttcatatcgttgtcgatcgagcgtatgttgacttgccatttgtcagtatcaaaagaagacagcagtggaatgtcggatatccattggtgacagtctgtgcgctgaaaaaagatgatgagatcagaatggctttcagcggcgtatgtccatttccgtttcgttctgctgaaatggaggctgtgcttaacgataaaagctattcattagaagatagagcgcgcaggtctttacagtatgtacccaaacccgttcttgatgatgcggaaggctcaagtgaataccgaatatttgtcttgcaacatacaattttagatgccttacgggaattagaaggaggtccaaatgtctgatcctattacgttgaaagtaaatggcgaggaaagacagatgacggtcagaccggctgatactttgttatttgctcttcgtcttcgtctcggattaactggtgcaaagccgggctgcttaaatggggattgcggcgcctgtacggtattaacggacggggtgccgatgaaatcttgcttaatgcttgcggcagaaggggaaggaaaggatattacgacaattgaaggactgatcaatacgccgattcaaaaggcctttattgaaaaattcgcgtttcaatgcggttattgcacaccgggttttctcatgaattgtcatgctttagtgaatactgagccgaatgcaagtgatgacacgattaaaaattggctggagtccaatatttgcagatgtaccggttatcgggagattgaagaagcggttaaatccgttttacgtatagggaaagggactcattagtccgtaaccgtaaaaaaaagagcccagagaatcatctctgaactccatattcttcacttcatataccgatactcccgcagtttctccaaaatcgccacttctttcatcagttcttcaccgacgtttgtttcttttactttcttccgctccagctctttgtcgactaatcgtttcactgttaagacgtcggttccggtgctcagcacttcggccttggagttaaagtgtttatgggcgacgagctgcataccgtatgagttgtataagagcgtgtagccggcgatgcctgttgtggattggtaggctttggagaagccgccgtcgatgacgatcatttttccgtttgccttgatcggatcttcgccttcgatttcttttaccggtgtatggccgttgatgatatggccgtgatccggattgaggccgaattccttcaggatgtttcggcaggttgcctcgtcttcacgcaaatagtaatacgggtttttcttttctttatgcgtttccttctctttaatgaaataccgctcaaaggttgtcatggcccgttttccgaagagggaggagtattcgcctgtccataagtaccacgtcatatctgtcgccagatcatcggtttcttccggatgggcaaacgcttcccgtaagaaccgttcaaatacatcgagcagctcacggcccgcataagctttatcctctatcatcatcgtttccatgctgccgttttcatcgacgggaatacagccgtgaatcaacaggttgccgttatatttcagatacaggctgcctttttcatcataaaattcatatggcggcccagcttttcggagtgctggacagaaaacagcagcttgtccatgacttctgcttcttcttctagcagctcgtcaggctgtttgggattcaccgtcgcaaagcaggtgttttccagttgatacgtttttccgttcagcgtgatttcattgcggtcataatcgatcttttccagtaacagccgttcttccatattaaagttcggccgtctcttaataatcgggctctcaagcttgaattggatcatcgcgatcgcctgatgaatttttgtgatttgtttaatctcatcttccggtctgttttcgtccgctttcgggcggaaagacgggttatcatcgtaatatttttcggcaaggttcaatagcggtctcagattgatgccgtaaacgtcttcaataatatccagattgtcatagcgggcacagatgcggataatatttgccaggcatacttttgagccggaataagcgcctatccagagaacatcatgattcccccattgaatatccactgaatgatagttgatcagttcttccatgattttatccggctgcggtccgcggtcgtaaatatcgccgaccacatgcagatggtcgaccaccaatcgctgcgtgctgtaggcaagaccggtgatcagcttatcggcctggccgagcgcaatgatctgttctatgatttcggagtagtattgttccttgttggcggcttgttctgttttgtacagcagctcttcggaaatataagcaaattgggcgggcagtgctttgcgcaatttggatcgggtgtacttggaagaacaataagaaacgagcttaatcatccgatgaatcgtttctttataccactcgtttaatgcctctttcgtatcaaagccatgtttgatcagcttcagtttgtcttccgggtaatagaccaaagccgccaattcatcaatttctctatcgtaaatgacgccgttgaaaatatcgcggatcttctcttttactcttcctgaaccgttccgcagcacgtgctggaatgcctggtactccccgtgcagatcactgacgaaatgctcggttcctttcggcaggttcagtatcgctttcagattaatgatttccgtgaccactttttcttcacaatcgtatttttgtgcgagcagatctaaatatttggtttccaatctcgtccatcccctttttatttacgagcaattgtatgataaagtgaatttaaagtatgacataatgtttaaatgattagaccttatatgatagtaccgcataacgcctttttgagacaatgaaaacggaagatacggcgcttcaggcatcaaaaattggaccgggataacgctgtgagcgtatacccctgttgacaatgcattcaacttccattaaaataaaaagttagctgatagttatttctatcggaaactcaatacgtagcaggctatgattgctgtgggtcgcactacagcaggagcggcttctggagagaccgcgggttttccgcggcgccgaagggttcacaatctcaggcaaaaggacagaagagtaccgaatatgtatttgtcatgctgttgattgtcagcggcgcaaatataatttgatattcttatgaccatgagattggagggcatccaatctctttttttattggctttttttgctcgtcgttcactagagaggtaaggaggagtcagatgtggagcagcgagagctaaagagggacttatcgaatcggcacgtgcagctgatcgctattggcggcacgatcggtaccggattgtttttagggtccggtaaggcgattcagctggcgggtccttctatcatctttgcgtattttattgtaggtattgcgctttttttcgtcatgagggcgctgggagaactgctgttatctaaagcggggtaccaatcattaacggatatagccgaggcgtatttagggccgcgtgcagcgtttgtcaccggctggacttattggttttgctggattatgacggctatggcggatgtgatcgccgtcggtgtgtatgtgaaatattggtttgatattccgcagtggattccggcacttatctgtttgctcattttattagggcttaatctgttaacggttaagatttttggagaattggagttttggttcgccttaattaaggtagtcacgattctcgcgttaattgtcatcggggtggttctgctggtgattgggttcaaaacgcataccggaacggtttcagcggcgaatctgtgggagcacggcggcttgttcccgaacggattttcaggctttttgctttcatttcagatggtgatcttcgcctatgtcggtgtggaattagtgggtgtgtcggcggcggaaacgtcaaatccgaaaaaaaatattccgtccgcgatcaataaaattccattgcggattttatttttctacgtcggggcattgatcattcttttatgtattaacccgtggatgcagctgaatgcaacggaaagtccttttgtaaagaccttcagtctggtcggcattccgttagccgcgggaatcattaattttgtcgtattaacgtctgccgcttctgcttgtaacagcgggatgttttcaacaagccggattctgtataacttaagcaaaacgaaacaggcgccggcaagttttgcgaagctgaataaaaatcatgtgccgagccgcgcgttatggatatcggttattgtgctgtcagcgggcgctcttttaagcaaattgataccggaagcggcctttggcatcgtgacaaccatcagcgcgatctgtttcatttgggtgtggggcgtgattcttgtctgtcatatcagatacaggaaaacccgtccggacttacacgcaagctcgtctttcaaggcgccgtttgcgccgtttatcaattacgccgtgctggcgctgtttgccttcattctggtgattatgctgtttgcggatgcgacgcgcccggctttgctgctgacgccgctgtggtttattggattgtttcttatctatcgggcgagagggagaaagacagattgaattacttcagacggtgtactgccatgcagtatgccgttttaatataaaaaaagcgctatcctgccgtgtaagcagggtagcgctttttacattaattccggatcaaataatcaaatgcgcctaaagcggcagttgcacctgatcccatggagataatgatttggttgtacgggccgtctgtgcagtcccctgcggcaaataggccgggaacgcttgtcgcgccgctcttatcgacgatgatttcgccgatgcggttgcgttcgacggtttcgtctaaccattctgtattaggcacgagaccgatttggacgaatacaccttggagttcaacgtgtttttcttcgcctgtttcacggtcaacgaacgtaatgccgtttacgttttggtcgcctgtgatttctttcgtttgtgcatttttgtgcacagtgacgttcggcaggctgtaaagacgtttttgcaggacttcgtctgctttcagttcaggcgcgaactccagcacagtcacgtgattgacgatacctgcaaggtcaatcgccgcttcgattccggagtttccgccgccgataacggctacgtctttgccttcaaataatggtccgtcacagtgcgggcagtatgcaacacctttgtttttgaactcttgctcaccaggtacgttgacattgcgccagcgggcacctgttgaaaggatcactgttttacttttcagtacagcgccgttttcaagttcaagttcgaagaggtcttttttctcaaggcgtttcgcgcgctgaaggttcatgacgtcaatatcataatctttcacgtgctcttcaaggcttgcagcgagcttcggtccttcagtcgctttgacgctgatgaagttttcgatgctcatggtgtcgagtacctggccgccgaagcgttcagcgacgacaccggtgcggatgcctttacgcgccgtgtagatcgccgcgcttgcgccggcaggtccgccgccgacaacaagaacgtcaaacggctctttgtcggcaaactcagacgcatctgcgccgctgcccattttcgcgagaatctcttcgatggtcatacggccgctgccgaaagattcaccgtttaagaaaacagtcggaacagccatgatgtttttgctttctacttcttctttgaatgccgcgccgtcaatcattgtatgtgtgatattcgggttgagcacactcatcatgtttaatgcttggacgacatcagggcaattgtggcacgtcaggctgatataagactcaaagcggtattctccgctgatgttcttaatctggtcaatgaccttttgatcagccttaggcgctctgccgctgacttgaagcaatgccagcactaatgatgtaaattcgtggccgagaggaacaccggcgaatgtaacgcctgtgtcttctccggtacgattaacgctgaagctcggtgttctgtttaattcagttttttcaactgaaattttagatgacatggaagccagttcgtcaacgagagccagcatgtccttagaagtgtcatcgtcaccggcgcttactttgagaacaatgtcgttctcaattagctgcatgtattgatttaattgtgctttgatatttgcatcaagtaccaatggaatgcactccttagattttacctaccaaatcaaggctaggtgtaagtgtttcgccgccttcttcccatttagccgggcagacttcacctgggttttgacgaacgtattgagctgcttttactttgtttactaggttgcttgcgtcacggccgataccgcctgcattgatttcaactgtttggataacgccatcaggatcgatgatgaatgttccgcggtcagcaagaccagtttcttcgtcaagaacgtcgaagttgcgggagatcgtttgagatgggtcaccgatcattgcgtaagtgattttgccgattttttcagagctgtcatgccagcctttgtgtacgaagtgagtatctgtagaaacagagtatacttcaacacctaattctttcagtgcagcgtattgtccttgaagatcttcaagttcagtcgggcaaacgaaagagaaatccgctgggtagaagcagaaaacgctccattgacctttcaaatcttcgtttgttacatcgatgaattcaccgtttttgaaagcttttgcttcgaatggcagtacttcttttccgattaaagacataatatcttcctcctgaaatgtgatttgaaatatattaaaaagacaaagcattcactttatctttcaataataattctaattatatatagattattaaataacatttattttttgtcaagctatatggggtattattttctgctttttttgctttagacgttaaaaaacgcctggtataagcggtttggcgctgtttgtcatgtttagcgccgggcgaaagggggattctcaattggtgaatcgaaacagtaggaatcaacccctctatatggcagtataaaccaaagggggtatgatcatgcaaataaatcacattactttgtacagttgtgcgttggaggagacgaaacacttctatgaacgggtgttaggttttcctttaattgatgagtccggggattcgtttaccatcaaggcgggagaaagtgagttggaattcaggcgcgccgattctcactctcaaccgacgtatcattttgcgtttaacattccgaataatcgttttgatgaggcgaaggcgtggataaaggataaagtcgtttttcaaacggaagatggggaggatgaggtgtatttctcccatattcaggcgcgttccttttattttaaagatccgtccaacaatctggcggaattcatcgcgagagacacatcgccgccaagcgcggaacgtttttcgattgagtccgttctgaatatcggtgaggtgaatctgacggctgccgaggtggtatcgacggggaaggagctgcagcgtctcggcattccggtgagaaagcatgcgcctcttagtgaaaacgggtttcattttatgggtgattacaatgatggggcgtttttgcttttagggccgagcggccgccgctggattttttctgatcagcatgcggagttccatccgctgtctgtcattgtgaacgggacgatccgcattgaggctgacggagaaggcggcattgacatcaggcgggcacagccgtcataaaaaagcccgggctcaaaaggcccggacttggggacattatttataaacaacccgggtgctgcacatgatgtcgtgcagcgtttttttctctccgaaggcacccatgatgaatccgatataaagaatgagcttggatatgatataggcgaaagcgcgtccgaaggcctggccgatggaaatgcgtccgccatcttcattgacgaccttaaggccgagcaatgcttttcccagggtcccctgcatctttgaggctgtgagcaggctgaaatataagatgctgatcacaatagagctcacaagaatcggaatgacgccgaacaccagaaaagagatgttaaactgattttcggtcatgaaggggtcagccgccgcaacgcctgccgcaaataaaaaagagaccataaattgaatgataaaaatcggaattcctatgatgatttgatcaatgacgtaagccagaaaccgaatccaaaatcctgccggtctttccatgtatctttttctctcccttgctttaatctggaatattatacgtaatcattccggattttgcaatggagcttaagcttctgcgagcagcctctttccccatgccaagcgtcccatgatcagcccgaaagccagaagggcaaacatgatgccgcaccacatcagctgatggattcccaaatgtgaaataaaccagccgcccgccgccgttccgatggtgatgccgaggttggaaaaggagacaaacaggctgttgccgaattcgggcgcctcctttgcttccgcagtaagccatgtctggctgacaatgagaccgccggaatgaacggcgccccatacgaagacgaggacggccatcggcgcgaaagacgtcccaaacccgtatatgagcaagtaggcggctgtataaagaagcggaaacaggatgacggtctttttcatatttttatataacaaagcaccgaagacgaaattcccggctatcataatcaccccgaaactcatcagcatgaagctgacccatgtgccgatcatatgggacacccgcccgaggtactccgcaaaatagctgtagacagaaaacatggccgcaaagagacaggtgacggcagcgatattgagccacaaagccggtttgcgaagaatgccgagctggcttctgaaagacattttttctgtgaccggcatggatggcaaaaagagaagaatgcccgtgaacgcgatgagactgatgatagcgccgaataagaaggcggcttcaagagagagacgatccgccagataagacgtgaaaggcacgccgaacgcaaagccggcggtgatgcctgaaaagactttcgttacggcttttccggattggccggcggggacaagccgggccgcggccgcaagcgctacagaaaagaacaccgggtggcataaagccggaatgatccgaaacgccagcatgacactgaaatgcgccgtatacgcgtagaccgcatttgaaacggcaaacatcagcaccgctaaaagcagaatgtatttccggtttatacctgaagcaagcaaggtcaaaaacggtcccgacacagcgacgatgaacgcgaaaatactgacaagccaccccgcttttgaagcagaaatatgaaatctgtccgccacttgcggaagaacgccgataatgcccatctcggtcgtgataatcccgaaaacccctagtgccaaaaatagaatgaagatggagctgctttttttcattgttatgtatgcctccttttatttaactacatatatagaaaaatagatatgttagaacaaaaaaatccctcctttcatggttatagctggtgctggacatagtcagcaaaggctttaatttgtttttcatttcttctgtaataggtccactttccgattcgttcggattccagcaggccggctttttgcatcgtcagcaggtagctggagatgacggactgcgcaagccctgactttgcctgaatatcaccgacgcaaattccggtgcggaaactgagtccctgatcaagataaggtctttcatcaaaatggtcttccgggtgtttaagccacgtcataatatcacttcgtgttttgttagataacgctttatgaatcaatatcggttccataacgtttattatatctatttttctggatttgtaaattcgtttttgacaaaacattctcaaattaagtaaatatcgtgctaaaatataacatattatcagattaccggtaaaaaagccgggttattgtcaggaggatattcacatgaatcaaaagaaaaaaggtgcggttgcggtgaccttgctttccgctctgatgttttgtttattgccggtcctcgtctcgctttctccgcttgcagaaacggggccgaacgcgaatcgttttaattccgcgggcatgtgggccgccgtcggtcagatccttgttatatatgcggtcccgctcattatgtatattctcggtgttcgtggcatgaaaatcatcatggctgttttttgcgggatcgggcttatcatttgcgcggctgtcttgttggtggcgttattgaccgcaatttccttagggcaggagctgtctctttattacggtcttttcgtttggtcaggcgcggctttcatcgtcaatgtggtgtggtatattgccgcgtttcgatcatccccgaagcatcagcaggctatgtgacatttgttctataaatctaccgaaaatacaaatatttcataggatgattatggtatgatgaaagcggtatagcagtttttaatagaaacgggaggaactgacattgaaaaaaaagacagcttcattgcgaatgaaaacattggcggccggcgctgcggttgctgcggctttatctgtgggggcggtttctgatctgccgggggcaaaatggctgcatccggcggctgctcaagccgcggaaacggtatttaaacaaaatcatgcggcatccggtttcttggcgggacggtatgacgcgcaggcgatgtctccgacgatgttcaactggtcaagggaaagccggtttacaagcactgccgatggcgcgttaaaatgggaaaagaatgttccggccacccctcaaaacggtgcgggagccgcggttgacggggacggcacagtatttattcaatcaaaagacgggaagctgacggcgtatcatccggacggtactgtgaaatgggtgacggaaaacctcgggacgacctatacgctgactccggtgctcggaacaaacggtgtcatttatcttccttctcacgataaaaaactgtatttcatcgacaaagaaaccggaaacattttaacatcggttccgctgagcggagcgccgagttccgatgcggctatcggctctgacggcacgctgtatgtgtcgacgctggataactatatctatgcgattaaaccgacgtcgccatcgacatggacgcaaaagtggaaatttaaaacaaacggcgtggtcggctccgctcccgtgttagcatcaaacggcactctgtatacggcaacgtacaataatatcttttacgcgatcaattccggaacgggccaagtgaaatggtcaaaaacgacgtccaacgggtttaaaggttatccggttattgatagagacggcaccgtttacgccggaaaccaggacggcaacttatacgcctatacatcaacgggtgctgtaaagtggacgttcccgttaaacggtttctccagctcttcattagcgatcgaccataacggcaatgtgtatatcggttcgggaagcggcgagctgttttccatcagcaaaaccggtaatatgaactggtctttctatacggacgggcctgtgagaacggcgccgctgattgatgcggacggcaatgtgtacttcggttctgacgataaaaacgtctatgcggttgacgctgaggggaatgaaaaatggcgctatcaaacagacagcaatgtcatttcctccccggttctggctgaagacggcacgctctacgtcggcacttatacgaaactgctcgcattcggggcaaaaaaataataaaaaagaatccgcgcacgcggattcttttttttatttagaggcttgaatgaatacgcctttttcatgagagaattctttaaaaccgtacacaccgtgatatgaaccgatcccgctcgtattgacaccgccgaacggaaggttgacgtcagtgaaatgaacgacgacatcattgacagaagcattgccggacgtcgtatgctgcagaacataatcgatcagctcctgattatggctgaatacatacaaggcaagcggcttgtcccgttcagtgatgtaatcaacggcttcactgatatcttcgtaattcataatcggcagaatcggtgcgaagatttcttcctgcatgatcttcatatcaggcgtgacgtttgtcagcacggtcggagaaatcgtgcggtcatgagcatcgaatacgccgccgaacgccgtttttgcccctttttcaatggcatcatcatacagggctttgacacggttaaagttgcggtcattgacaatctgcgtgaatttgttgcggtcaaccgtatgatcatcctccataaaacctgcattgacaatggtctgcaggagatctgtaaaggtgtcctgtacatcttccttcataaggagatagtcaggggcgatacatgtttgccccgcattgacaaatttgccgacggcgatttttttcgccgcgtccatcaaatcatagccgctgtcgatgatcgtcgggctctttccgccaagctcaagcgtgacggacgacaaatgcttcgccgctgccgtcatgacgattttaccgacattcgtgcttccggtgaagaaaatgtggtcaaacggctggtcgagcagttctgtcgcgacatcgacctcaccttcaaaaatggcgacttcttcttcgtgaaatgcctcgcgaataactgtcgcggcgatatggctcgtctccatcgtaaaatcggacagcttcacaatcgcgctgtttcccgccgcaatggcagccgcaagcggagccatcgtcagcataaacggataattccatgggccgagaattaaggtaaggccttttggctcgtacattaatacgccgtcagcgtcggggctgacggatgagccgacgcgtttcggcgccatccaggtgtcgagattgttcatattatctttaatcgccttgatcgttccctgcgtttccgctcttttcacctcatgataaggcttgcggacgtcccgtctgatcgcctcgatgatttcttcttcatgtgcggtgacggcatctaaaaagcgctgaagcttttctctgcgctgcccggctgttgaagcacgcagcgttttttgattttttttctgaagcgcaaagacgcgtttgatgtctgcttttatatgctgatccatcggttttcctcctctggttgcttttttatttcttcagggcctattataatgtgatgtgtttttgcggcaaagacagcgtaaacgcatctatacgttaccgtacaaattgccgtgatctgtctaatgaaaggagtgtctcttatgccggattctatgacaaatgacatcaaacaagcgcttttggccatgcttggagagcgggatatccgccgtgtgaccatgaaggacatcgccgaacgggcgcacgtgagccgggggacactgtacctttattacgaagataaatatgcgattttagaggatatagaggaagaaatgaaagacgggctgagcgaagcgctgtatgattcgctgaagaataaagatgtgcttcatttacagggcggatggcaaaaagtgcatccgacactgtcttttgttgaccggcaccgggtgttttttcaaacgatgatggaccgtcataaaatgccgtattttcacgttcatgcttttttaaaagatgtgttccggcatgatgtgctgctgtcaccggtcaatgcggatttctcaccgactgaacaggatatgtacattcattaccgcgcgttatacacatatgccattgtgttgtactggctgaatgaggagcccggggcatccccggaagaaatcagcggacaggtgtgggatttgatttctcaaaaacggttttactggctgtttggccgccgggtgccggaacaagaagaaaaaaagcccgccgaccgccgggtgacaaggacgaggcaggccttgcaagaagccatgatcggcttaatggcggaaacaaaagagtacgcggcgatcacgatttccgatattgcccgtcaaagcaacctccgccgtgccactttttatgaccattacgccaacaaagaagcattgctgaaaacgatcatccatcaatcatgccgggatctgatcggattattgacggtaaaaggagatcctgccgactgttccgtggaagaagcggaagccgcgctcgtccggctcttttcggcgctgtccggcggccttccgctcgttcattttctgagagagggttcaggagtgcctgacgtcatcccggaaatgttcagagcgctgcaatcgttttatcttcatcagcctctgcacattcaggcgggcaaaaagctctatgcatactatgtcgcgtccatgctcgtcggtctgattcaatatcgtcttcatgaaggaaaagaccacgcgccggatatgctggcccgggagtttctgcagtttttggatgtgaagaagtatcgggtgattttgctgtgaggatgatgaaaaagaactcggccgaaaacaggccgggttcttttttgctgttttctttgagaagtgcagatatgaaagaaaccttccatatgacgcctgattagcattctgccgccaaacatgacaaatgtcatattcggggcatgatggctgctactacaaccgcgtcgggcgccccgttatacttgaggtcataatgaaaaagaagggacatgacattcatgatcaatcacgccgcaactcaaaaacaagcgtctttaaaaaagcaggttgccgcattttccggcgccgatacaaagcatagtatcattcagcttttcaacacgtttgtgccgttttttgccctttggtttcttgcttacttcagcctcaatgtctcctatcttctgaccctcgcctgtactgttatagcagcgggatttttgacaagaatctttattattttccacgactgctgccaccaatcctttttcaaacaaaagaagctgaaccggctgttcgggtttatttcaggtgtgctgacactgtttccgttccttcaatggcagcgaagccactccattcatcatgcgacaagcagcaacttagataaacggggcaccggcgatatttggatgatgaccgtcaaggaatataacgaagcgtcagcctggacaaaaatacgctacagactttatcgcaatccgtttattatgtttattctcggcccgatttacgtatttctgattaaaaaccgtttcaatgtaaaaggcgcccgccgcaaggagcgctggaacacctatttcacgaacgcggcgattgtcttattggctgctgcgacgtgcttgcttctcggctgggaaaactttttgcttgttcagggtccgattttccttatttcggggtcaatcggcgtctggctcttttatgttcagcacacgtttgaggattcttattttgaagccgatgagcattgggattatgtgcaggccgcggtagaaggaagctccttttacaagctgccgaagcttttgcaatggctgacgggcaatatcggctatcatcatgtccaccacttaagtccgaaggtgccgaactacaagctggaagccgctcatgagggacacgagcctttaaaaaacgtaccgaccattacgcttaaaacaagtcttgaatccatgaaattccgtctgtgggatgaggacgaaaagcagtttgtcaccttccgggaggcgcggaaaacatcggcgccccatccggtgccgaaagaacctttaaagaaaaatgcctgatacggcgcacggctctttctcttatcagaaagagccttctcttcatgcgtgagggtgcaatgaaggcggtgttttgataaagtgatggtagacacaagcagcagaaggtggaacaaagatgaagaagtattttaaatttcaaaaactgaacgggatttctccttatatatggacgatttttttcatcctgcctttttattttatttttaaaagctcttctaccttcgtcatcgtggccggcatcattttcacgctcgttttctttggcgcataccgctttgcatttgttgcaaaaggctggccgctttacttatgggcgcttcttctgatcggcatttcgaccggctcagccatgctgttcagttatatttatttcgccttctttattgcctacttcatcggccatatccgagacaaagttccattttacatcttatattacattcatatcatcagtgcggcggttgccgtcaacttcagccttgttctgaaaaaagaatggtttttgacacaaattccgtttatcgtcattacactgatcagtgccatcctgcttccgctcagcattcgaagcagaaaggcacgggagcgccttgaggagaaattagaatatgcaaatgagcgaattgccgatcttgtgaagctggaagaaaggcagcgcatcgcccgggaccttcacgatacacttggacaaaagctctccttaatcggactgaaaagcgaccttgcccgaaagctgatatataaggaccctgaacaggcccgcgctgagctgaaaagcgtgcagcagacggcccgcacttccttaaatgaggtcagacaaatcgtctcatcgatgaaaggcatccgattgaaggatgagctcggcaatgttcggcaaattcttgaagcggcaggaattgaatttgtgtatgaagaaaaagaagcgcccaaacatatctctttgctgaacgaaaacatcgtcagcatgtgcattaaagaagccgtcaccaatgtcgtgaaacacagcggcgccaaagtatgccgcatcaccattcagcagctttggaaagaggttgtcattacggtagaagatgacggaagctttcaatgcagagaagaccgctttttttcaaaggggcacggcctgcttggaatgagggaacgtcttgaattcgcaaacggcagtttagccatcgatacagccgccggaacaaagctgaccatgagaatcccgaatgattcaaaatcaaaagaaaaggatggtagcagatgatcaacatcttcattgccgaggatcagcaaatgctgctcggcgcactcggttcgctgttgaatttagaagaggatatgacggttgtcggcaaaggcacaagcggccaggatgccatcgatttcgtggaaaaacatgcgcccgacatctgtctgatggatatcgaaatgcccgggaaatcaggtcttgaagcggcagaagaactcaaggacagcggtgtgaaaatcatcattttgacgacctttgcccgctccggctattttcagcgggcgctaaaagcaggcgtcagcgggtacatgctcaaggacagcccgagcgatgagctcgtcagcgccatccgcagcgtcatgaaagggagacgcgtctatgcacctgaattaatggaggacatttatagtgaagaaaacccgctgaccgaacgggaaaaagaggtgctcgagcttgtcgcagacggaaaaaacacgaaagaaatcgcaaacgccctcagcatcaaaagcggcacagtccgcaattacgtttcgatgattctggataaactagaagtgaaaaatcgaattgaagccattacccgatcaaaggaaaagggctggtttaagtaacccgccctcagcttgttcagccagtgttttttttacactggctttttttattatctatcgtcactccgtctcttccttccacttcttatcaatcagcattttccccggccaagtgtatgccatgatgccgccgtctgcggtgatgtcttctcccgtgacgtaagagctgtcgtctgaagcgaggaagagcgcgacagccgccatttcttccggttttccgagccggccgagcggcgtgatccatttgttggcttcacggaacgcctcgcccatttcgtcttctttcgtgcctgccaatttatcaatgagcggcgtttcaattgtacccggcgataaggaattgacgcggattccgcttctggcgtaatcaatggccatcgctctcgtcaggttcgtgattccgccttttgcggcgttatagccggaacggtcaaggtctgcggcccggccggacatggaggaggtgttgatgatggagcctcctttttcgagcatgagcggaatcaggtatttgctgcacagaaatgtgccgcgcagatcgacggcgatgatccggtcaaacaggtcgaccgggtattcatggacattgccgccctcttggtcaacaccggcattgttaaacagaatatcaattgttccgtacttttgctgaatgccgtctgcaaaagactttacgttttcttcatctgatacatcaaggtgaaaggcttctgcttctccgccgttttttctgatggcgctgacggtttcattcagttcgctttcattgatgtcaccgcagatcacgcgggcgccttcatcggcgaaaacccgtgccgtcgcttgtccgatgcctgtcgcggcccctgtgatgattgcggttttgtctgttaatcttcccatattgcgattcctcctttttctatacctgttcccgctgaatagggggataaacatacggaggtttgtttctaattacctattaaatatgttaatattatgtatatacatcattgggaggtttacatattttgaagatacagcataagaaggagatagcgttttattgttatgccattgttcctatgggatttgtgatctacaccgttatctctattctgtttcaggacatcacgtttcctctcactgtaagaaatgttctgcatgagtctttgcgaaacttgggatctcttatcttatttagtttgtttttctacccgtcatacatatggatgaagaaggaattcggccgccggaaagaagcagagaggagaggatgatcaacattctctcttttttattgataaaatgggtgaaatgaatccattaacatgttaaatttacaatatatgcatctgctaatcctagttgacaattgtcactgtatatgataaatagatgctgaaaagattttacataacatcaaagcataattaaaggagagatctgaagtgcggaaaaaaaagtttaaagcagaatccaagcgattgctggacatgatgattaactccatttacacgcagaaggaaatttttctccgcgagttaatttccaacgcgagcgatgcgattgacaaaatctattacaaggcgttaaccgatgattcattaacgtttgatcaagacaattactatataaaagtgacggcggacaaagaagcgagaacgcttaccgtcacagataccggtatcgggatgacaaaagacgagcttgaacagaatctcggcacgattgcgaaaagcggttcactcgctttcaagcaagaaaatgactcgaaagacggccatgacattatcggccagttcggcgtcgggttttatgcggcgtttatggtggctgataaagtcacggtgaaaagtaaggcgctcggcagtgacgaggcgtatgtatgggagtcggaaggggccgccggctacacgatcgcgccgtgtgacaaggaaaccgtcggtacggaaatcaccctgaaaataaaagaaaacacagaagatgaaagctatgatgagtttttagaaaactaccgcatcaaagcgatcgtgaaaaagtactctgattttatccgctacccgatcaaaatggaagagacggtcaacaagccgaaagagggcagcgagaacgaatttgaagaagttcaggaagaacagacggtcaacagcatggttccgatctggagaaaaaacaaaagcgagctgacggatgaggattacgaggctttttacgccgagaagcattacggttttgataaaccgctgacccacgtgcatatcagcgtcgatggagcggtgcgctacaattcgattttgtttattccggaaaacatgccgtttgactattatacgaaggaattcgaaaaaggattggagctgtattccaacggcgtgctgatcatgaacaaatgcgccgacctgcttccggatcatttcagctttgtaaaaggcatggtggattctgaggatctgtcgctgaacatttccagagagatgctgcagcacgaccgccagctgaagctgattgcgaaaaacatcaataaaaaaatcaaagccgagctgaagagcttgctgaagaacaaaagggaaaaatacgaatctttctatgaatctttcggcagacagctgaaattcggcgtctataatgatttcggcgcgaataaagacgtcttaaaagatctgcttctcttctattcatctaaggagaaaaagctcgtcactctggacgaatatgtgtccagaatgcctgaggatcaaaaatatatctattacgcgtccggcgattcatatgagcggattgaaaagctgccgcaaactgaaatggtggcggacaaaggctacgaaattttatatttcacggaagatattgatgaattcgcgatcaaaatgctgacaagctacgaggaaaaagagttcaaatccgtctcaagcgccgacttaggcatcgacagtgacgaagatgataagcagactgaagccgaagaaaacgaatataaagacctgttcgaaagcatgaaagagattcttgcggataaagtcaagaatgtcagagcctcaaaacgcttaaaatctcatccggtctgctttgcgacagacggcgaagtgacgatcgaaatggagaaagtgttaaacgccatgcctgacagccagcaggtcaaagcggaaaaagtgctggaaatcaacccgaatcacgaagtgtttgagacgttaaagaacgcgcacggacaagatcgggaaaagcttgctttatacacaaacctgctgtacaatcaggcgcttctgattgaagggctgccgatccatgatccggtcgagtttacgaatgatatctgcaaagtcatggtatgacgccaaaaaggaatcgcccagcggggcgattccttttttgattacagtgtgcgctgtttaagaatttgattttgtttgctgcgcttctttaaggagaaccgttttttcaagtgcgtttcgatttcttctaaacttttgcccttcgtttcaggaacgatgtaagcggcaaagaagaaggatgtaaggcagatgactgagaatattccgaacacccagccgatgcccattgcgctcagcataagcggaaataccagcgaaacgatcaggttggttgccgacagaatcaatgtcgtaaatccggttgcggctccgcgtgcgtttgacgggaacagctccggcatcagaacccatacgacgggaccccatgtcgcctgataaaagacgatatagattccgagaaacagcacggtcagccaagctgttgaagctgacaggccggccagaaggagaatggctgatagtgacgccaggctcaaggtaatgccgacacttccccacatcagcagttttttccggccgatccggtcaattaagatcatggcggtgatacacatgatgacgtttaagacaccgatgcccatcgtgccgagaacggacgccgaagtgccgagtccggcctttgtaaagatggtcggcgcatagtaaatcaccgtgttgataccgaccgcctgctggaagatggcgaggccgatcccgatcagcagcataggacggatccattttgctttcagcaagccgagcgtagattcttttttctcggcttctccttgtttcatttccgccaattcaacggcgatatcctctttgtcgtgagtcatttccatgacttgtctggcttcctgctcacggccgcgtttgacgagccatctcggagattccggcataaacgcgattccgattaataaaagcgccgccggtactgccgcgagaccgaccatccagcgccaagcttcaaacggggtgaatatgtaattcacaatatatgcgagtaaaattccggttacaatcattaagttattcaatgtgccgagcgttccgcgtatttttgtcggcgccatctcagatagataaacgggaaccagcgccgttgagcctccgacggctaacccgagtatgacacgggagataatcagcatggtgacggtttgcgaagccgcacaggcaagcgcgccgataataaaaatgagtgaaaggacgaaaaccacttttctccggccccatcggtcagagcatgtcccgcttaaggcggacccgaaaatcgcaccgagcagcagcatgctgacgaccaatccctcggtcagcgtgtttaaaggaatatcattgttaataaataacaaagcccctgaaatcacaccggtgtcatagccgtaaagcagcccgcccaatgctccgaaaaagtaaatcaggtattttttggtgtttttcttcacagatgatcctcctcatcttttggaacgcataatagtttatttagataactatttcattccccgaagagaaaaatataaacataaaaaaacacgccctttcaaaaaggcgtgttatttttcttaggaaaacagcttgtcaataaacgcgatttcttcagcagatagcgtaatggaggctgctttcatgttgtcttttaattgatccgcgcgtttggcgcccggaatcaggatatcgatttcaggtctcgccaagtaccaggcaagcacgatatgcgccgtatcggcattgtgcttttcagcaatcggtttgagctggttgacttttttgatgttttctttaaactgctccccttggaaatgcgcctgatcattgcgcaggtcgccttccgggaaggttgtgttctcgtcgtatttgccggccagcagtccggatacgagcgggaagtacggaatgaatgagatgccgtgttctgtcgtataagggaagaaagtcttttccgcctcacggttcagcaggttgtattctccttgaatcacgtcgactaagccgtctttattagcttctttcagctgctccaaagagaaattggatacgccgatggaacggatttttccttcttttttcagctcattcaatgcttgaacggcttcgtccttcggtgtatgctcatccgggaaatggatgtagaataaatcgatgtaatccgtctgcagccgtttcaggctgtcttcaaccgattgtttcaaaaaggccggtgagttgtcgaaaacaaagtcattgccttcttttctatgagcggcttttgtggcgatgaagacatcctcgcggttatattctttcagcacctcgccgatcaattcttcagaacggcccacaccgtaaatataggcggtatctaacatggtaacgccgcttttaatcgcttcccggaccaattcttttcccgtttcttcattcagattcggatagagattgtgtccgccgaccgcatttgttcccaaaccgatcggaaatacctttaggtcagttttgccgattgttactttgctcatgttttcgccccctgaaaaaattggatatcatagcgcctgccgggaaaatacggcagcgttctctattaactataacgctatgccaagtgaatgtcgatttggtgctcttggcaatacttcgtatattcctcatcgagctgctgagaagtgacgatgctgtgaagccggtcaaaaggcgcgtatgtcaaaagcgtggatttgccgaatttggaatgatccgcgagcagatacacttcgttcgccttttcggaaattttctttttcacctcgtattccagtaagtcggaattcgtcaggccgtgggtgatcgttgtcccggtagcggacatgaacgccttgttaatgttgtatttattgagtgtgcccggatcatcaatgccgacaaacgaccttgtcttccgtttgtagttattgccgatgatgatcaggtcgatatttttcatggatgaagcggcgttaataatatcaaggctgttcgtcaacaccgttacattcttatccgggtcaagcgtctccagcatcgatttggtcgtcgtgccggaatcaataaatacaagatcgtgatcctcgataaaccgcgacgcatagcgggcgattttgattttttcatcctgatgttgaatggtgcggttctcaaaagggacgagcacagatttttctgctgacgtcacgccgccgtacacctttttgatcacccctttttccgcaagcttattaatatcgcgtctgaccgtgtttttagagacgttgaatacctcgcacagctcatccagcgaagtggctccgtgtttgagaatgtattcttccatctcctgaatccgcatcagtttcataaaaaaactccttctagaattcttaaagtaattaaaatatataataaacaccaagagttaatcaatagttacttaacaaatgataaaaaagagggttcccaccgtacgattcgacacggttctccaagttcctgttttcccgcttaaaaaaagtatgataaaaataatgaaaaaattttgattttttagattgacttgaaggtgtgttgggcttacaatgtaaccaagaaatgaccaaaatataacctgtaaaatcaaaagtgaaagatgtaaccgtttgctttatccggcacatgaccaacttttacatgaaaagattgggagtcaccatcattttagcatttgtaagcgtttaattcatgtcttttatatgtaaaagatgaatatattcatccgttattatccagctgaacaggatgtttactatttaaggaggcaatgagaatggcagagatcagaaaactgaaaaactacatcaatggtgaatgggttgaaagtaagacagatcaatatgaagacgttgtcaatccggctacaaaagaagtgatgtgccaggttccgatttctacgcgggaggatgtggaatacgccgtccgctcagcgtcagaagcgtttaaaacatggtcgaagacggcagtgccgcgccgtgcgagaattctatttaactatcagcagcttctccagcagaacaaagaagagcttgcccgtctgatcactttggaaaacggtaaaaacacgacagaagcactcggtgaagtgggacgcggaattgaaaacgtcgaattcgcagcaggcgcgccgtcactcatgatgggcgattcacttgcctctatcgccacagatgtagaggcggcgaattaccgctatccgatcggggtggtcggcggcatcgcaccgttcaacttcccgatgatggtcccgtgctggatgtttccgatggcgatttcgttaggaaacactttcattctgaagccttctgagcgcacgccgctgttaacggaaaaactggcagagctgtttgaacaggccggtctgccgaagggcgtcttcaatgtcgtgcacggcgcgcatgacgtcgtaaacggcattcttgagcatccggagattaaagccatctcattcgtcggttcaaaacctgtcggcgagtatgttttcaaaaaaggcagcgaacatttgaaacgcgtgcaggcgttaacgggcgcgaaaaaccatacgatcgtgttaaatgacgcccaccttgaagatacggtcacaaacattatcggcgcggcattcggttcggcaggagagcgctgcatggcatgcgcggttgtgacggttgaagagggaatcgccgatgagtttatggcgaaattacaggaaaaggccgcagacatcaagatcggaaacggactggatgacggcgtgttcttgggcccggtcatccgcgaggacaacaaaaaccgcacgcacagctatattgaaaaaggcatcgaagaaggagcgaaactgctttgtgacggccgtgaacatgtaacggaagacggctatttcgtcggaccgacgatttttgacaacgtgacgacggatatgacgatctggaaagatgagatctttgcgcctgttctgtcggtcatgcgtgtgaaaaatttaaaagaagcggttgacatcgccaaccagtctgaatttgcgaacggcgcctgcctgttcacgtcaaatgcgaacgcgatccgctacttccgtgagaatattgacgcgggaatgctcgggatcaaccttggcgtcccggcgccgatggcattcttcccgttctcgggctggaagtcttctttcttcggcacattgcacgcaaacggaaaagacagcgtcgacttctatacacgtaaaaaagtcgtgacggcacgatacccgtctcctgacttcaattgatcagacagccggcccggacggctttgtgattccgtccgggttttcttttaccatccattaaggaggaataaacatgagtcatttgctgcgcaaaccgcaggccgatgaaatttctcaaggcgtgaccatcatacatgacgtcacttcagccaattcagacctcaaatacgtcggatttaaagtcgttgatctcgctcccggctcaacctatacagaagatttgaaaaagacggagtgctgcatcgttgcggtaactggaaaagttaccgtcactgattatgatcagacatttgaaagcatcggcacccgtgaaagcgtatttgatagaaaaccgacggacagcgtttatgtgtccaatgaccgctcttttggaatcacagccgtcagcggggcgagggtcgcgctgtgctactctccgtccgaacaccagcttccgacaaagctgattaaagcggaagacaacggtgtggaacatcgcggcaagctggcaaacaaacgaaccgttcataacattctccccgattcagatccatcggcaaacagccttctcgttgttgaagtttacacggacagcggcaactggtcgagctacccgcctcataaacatgaccaagacaatctgccggctgaatcatttttagaagaaacctattaccatgaaacggacccgccgcagggatttgtcttccagcgtgtgtacacggacgaccgctcgattgacgagacgatgaccgcagaaaatgaaaacgttgtcatcgtgccggcgggctatcacccggttggtgttccggacgggtatacctcttactacatgaatgtaatggcgggaccgacacgaaaatggaagtttcataatgatccggcccatgaatggattctggaacgctgacaagtgaggagtggcagataacgatgaaatatacgtttaatgaagaaaaagagtttgatattgtcgcgatcggacgcgcgtgtattgatttgaacgcggcggaatacaaccggccgatggaagaaacgatgacgttttctaaatatgtcggcggctccccggcaaatattgcgatcggcagcgctaagctcggattaaaagccggttttatcggcaaaatcccggatgaccagcacggcagatttatcgtttcttatatgcaggaaaagggcgtcgatacgtcacaaatgaccgttgacagagaaggacgcaaagccgggctcgcttttacggaaattctcagtcctgaagagtgcagcattctgatgtaccgggatgacgtggcggatttgtatctagagccgtccgaagtcaatgaaggctacatcgcaaacgcgaaaatgctgctcgtatcaggtacggcgcttgcgaaaagcccgtcgcgcgaagccgtcttaaaagcggtgcaaatcgcaaaaaaacatgacgtaaaagtcgtgtttgagctcgactaccgtccgtatacatggcaatcggcagaagaaacagccgtgtactacacgctggcggcggaacaatccgatatcgtcatcggtacgcgtgacgaatttgacgtaatggaaaaccgcagcggcggaaataacgatgaaaccgtccgccatttgtttgcgcactccgccgaccttgtcgtcattaagcacggcgttgacggatcatacgcatacagcagatcgggagaagttttccgggcgcacgcctataaaacaaaggtgctgaagaccttcggagcgggtgattcctatgcgtcagctttcatctacggactggtcagcggccgggatattgaaacgtcgttaaaatacgggagcgcttccgcttccatcgtcgtcagcaaacacagctcctcagaagcaatgccggctgccggtgaaatcatcgaactgattgaagcgcagcacagtcttaacggtaaatagaacgtataaaaggtgggatcgtttgtgggtaagacaattcgcttaacgacagcacaagcgctgattcaattcttgaaccggcagtacattcatgttgacggaaaagaagagccgttcgttgagggcatcttcacgattttcggccatggaaatgtgttggggatcgggcaggcgctcgagcaggacgccgggcacctgaaagtctatcaaggcaaaaacgaacaaggcatggcgcatgccgcgatggcatacagcaagcagatgctgagaagaaaaatttacgcggtatcgacatcggtcggtccgggtgccgctaacttgacggctgccgcgggtacggcgctggccaatcatatcccggtgctgctgcttccggccgatacctttgcgacgaggcagcctgacccggtgcttcagcaggtggagcaggaatacagcgccgccgtcacgacaaacgatgcgttaaagcccgtgtcccgctattgggaccgcatcacccgccccgagcagctgatgagcagcttaatccgggcatttgaagtgatgacagatccggcaaaagcgggcccggcgaccatctgcatttctcaggatgtagagggagaagcatttgattttgatgaaagcttctttgaaaaacgtgttcattacattgatcggatgcagccgagcgagcgtgagctgaaaggcgccgcggagagaattaaggagagcagccgtcccgtcattttagtgggcggcggcgcgaagtactccggcgcgcgtgaggaattaatcgcgctttctgaaacatacggcattccgcttgtcgaaacgcaggccggcaagtcaacggttgaagccgattttgccaacaatctgggcggcatgggcatcacgggcacacttgccgcaaacaaagccgcccgccaggctgatctgatcatcggtgtcggcacacggtacacggactttgcgacatcctcgaaaacggcgtttgattttgacaaagcaaaatttttgaatatcaatgtcagccgcatgcaggcatacaaacttgacgcgtttcaggtcgtagccgatgcgaaagtgacgctcggcaggctgcacggcttattagacggatataaaagtgcattcggcacggcgattaaaggctggaaagatgaatggctggctgaacgggaccggctcggcaaggtcacttttacacgtgacgcgttcaagccggaaattaaaaaccatttctcacaggacgtgttaaacgagtatgccgacgcgctcgagactgagctgccgcaaacaacggcgctgttgaccatcaacgacacgattcctgaagacagcgtcgtcatcagttcggcgggatctcttccgggcgatctgcagcggctgtggcattccaacgtcccgaatacgtaccatctggagtacggctattcctgcatgggatatgaagtatcgggcacgctcggcctcaagctggctcatcccgacaaagaagtctattcactcgtcggcgacggaagctttctgatgctgcactcagagctgattaccgcgcttcaatataacaaaaaaatcaatgtcctgctctttgacaactccgggttcggctgtatcaacaacctgcagatggatcacgggagcggcagttatttctgcgagttccgcacagaggacaatcagattttaaacgttgattacgcgaaggtggcagagggctacggcgctaaaacatacagagccaatacggttgaagaactgaaagcggcgcttgaagatgcgaaaacgcaagaggtatccactttaattgaaatgaaggttctgccgaaaacgatgacggacggctatgacagctggtggcatgtcggcgtggcggaagtgtctgagcaggaaagcgttcagcgggcatacgaagcgaaagagatgaagctgaagtctgcgaagcagtactagaggggaggcatcacgatgggcaaacaaaatattttgtggggcatcgctcccattgggtggcgcaatgacgatatgccggagatcggagccgggaatacgctgcagcatttgttaagcgatattgttgtcgccggttttcaaggtacggaagtgggagggtttttccctgaaccctccgtcctcaataaggagctggctctccggaacttgcggattgcggggaaatggttcagcagctttatcattcaagacggtattgaaaaaacggctgaacaatttacagaacactgtgattatttgcagaaagtcggagcggatgccgccatcgtttctgaacagacgtacagtgtccagggcttggatattgatgtatttaagaaaaaaccgcacttctcaaatgaagaatgggatacactgtgccaaggcttgaaccgtctcgggaaaatcgctgacgaatacgggctggagctcacgtttcatcatcatctcggcacaggcgtccagacggcggaagaagttgaccggctgatggatggaacggacccgcggtatgtccatttactttatgataccggccatgcctatatctcagacggagactatatgacgattctcaacaagcatatggatcggatcagacacgttcatttcaaggacgcgcggtttgacattatggagcggtgcagacaggaaggcaagtcattcaggcagtcgtttttacagggcatttttacggtgcccggagacggatgcatcgattttaccgaagtgtaccaaacgctcgtccgtcatgattattcaggctggatcgtcattgaagccgaacaagacccggcagtcgccaatccgcttgagtacgcgctgattgcgagaaagtacatcgacagtgaactgcttgatcctgcaaattagagggggacttatatgaatagtgccaaggcggaatcagctttcagcaaacggaccatcgccgcagcattagcaaattacattgatgcaggttccatcgtggcaggatcagcgggtttatctatgtgggtcagctacttgaagctgtccgacagtcagatcggattgctcggcgccttcagcgcaaacgcgatatcagcggccatcggagcgctgctcggcgggtatttggctgataaggtcggccgaaaagctgtatacacaaacagtatgctcgtctacgctttaggaatttgtttggttttgtttggattcaactttcccatgctgttatgcggatacatgattatcgggatttctgtaggcgcggatattacggcttcatggaccattatcgcggaaaacgcccccgagaaaaaccgggcgaggcattgcggagtggcgcaggtggcgtgggccgccggagccgttgtggttctgctgttatccgttttggtcggtgacctcgggcttttaggaaataaaattgtctttgcgcatctattggtgatcgccctgatcacatatgtgataagaaagcgtttacctgagtcggatgcctggaaaaacagtgaagagcggcctgccgccgtgaaaaaaacatcttattttgacttgcttcagccgaaatttttcaagaacattttgtttttaatgggtgtgtttctcgtatggaatctcgccgcgggcgtcatgggattcttcatgccgtacatctaccagcaggtcggcggcgtatccgcaaatacggccaacattctgcagatggccctgtttatcttcaccgggctcggcgtcgcctgtatcttcatgccttttgcagatcaatatcggaaaacggtgttcggaatctgcgcctttatggctgttgtcggctggtcgctgtttttgctgccgtttcagggactcccgatgctgcttttgtttgttttagcgatcggcatcaataacggagccggccagcaggcgaactaccagctgtgggcaagcgagctgttcccgacagaacacagagcgtcagcacaagggctcatgttctttctcgtccgtatttcaatcggcatttggagtttatttgtgccggtcatcatgtcacaattcggcatcggttttatggccggtattctgctcatatgtgtgacggccagtatgatcatcgggcttgtcttcgcaccgaatacgtccggcaagtcgcttgaacagatacaggaggaactgtacggtgctcctcaggacggcagagagaaaagaaagacgagaaccattatttgattatcagaaggagtggcgatcaatgaatttacgtataggtgttatcggaaccggtgctatcggaaaagagcacatcaaccgcatcacaaataagctgtcgggcgcggaaattaccgctgtcacagatgtgaatcaggaggccgcgcagcagaccgttcagcatttcaatttgaacgcctcggtttatcctgatgacgacagccttctcgctgctgaaaatgtggatgccgtcttagtgacaagctggggcccggctcacgaatccagcgtgttgaaagcgattcagcacggcaagcacgtgttttgtgaaaagccgcttgcgacaacggcagaaggctgtatgcgcattgtcgaggaagaaatgaagacgggaaaacgattggtgcaggtaggtttcatgcgcagatatgacagcggttacgttcagctgaaagaagcgatcgacaaccgtgcggtcggcgagccgctgatgattcactgtgcgcaccgcaacccgacagtcgcatcgaattattcaacggacatggccgtcgtcgatacgctcgttcatgaaattgatgtcctccactggcttgtcaatgacgactatgaatccgtacaagtcatctatccgaagaaatcaaaaaatgcgctgccgcatctgaaagatccgcagatggtcatcatcgaaacaaaaggcggcatcgtcatcaatgcagaaatctatgtgaactgtaaatacggctatgacattcaatgtgaaatcgtcggggaagacggcgtcattaagcttccggaaccgtcaagcatcagcttgagaaaagaaggaaaattcagcaccgatattctgatggactggcagcgccgatttgcggctgcgtatgatgtggaaattcaggacttcattgattcgatccggaagaaaggcgaagtcagcggtccgacggcatgggacggttatattgccgcggtgacaacagacgcgtgcgtaaaagctcaggaatccggacagaaagagccagtggcgcttcaagagaaaccggcattctatcaatcatttacgactgtgaacaaataatagatcgggagtgaaaaaatgaaactggccttagatccatccatgtaccgcgatgatttaacattagaggaaatggtctataaaacggcggaactcggatacgaatatatcgaactgtccccgcgcgaggatttttgtcctttctataaatatccgaaagtcgattcagcaaaaatcaaacaattgaagcgccttttaaaggatacaggtgtgaagctgtcctcccttcttccgctttaccactgggcgggtcctgatgaagaccgccgccaggccgccgtgcgcaactggaaacgggcgatcgaaattgcggttgaacttgaagtggatttgatgaacagtgaattcagcggttcaaagtatgatccgttgacaagtgaagaaaaattcatcaaatccatggatgagctgctgcccgtctttgaaaaagaaggcgttaaactcaatcttcaagcccatccatacgattttatcgaaacgcacaaaggtgcgatggatatgatccgcgcgctcgataaggattggatcaatcttgtctactcgactgcgcatacgttcttctatgatgacggcaaaggcgatatcgaaaccatgtttgatgaagccggcgaccgcctcacacatgttttatttgcagatacttttaatcataaagcggcgcacggcctgcgttacatcgtcaatccgcctgatgcgaaagtaacggttcaccagcatctggacatcgggcaaggcgaggtcgattttgagacgattttcagaaagatgagagagatgaaattcgacggaattgcgacgaacgccgtgtttgcttgggtcggcgaaagagcggatgaatcaagccggaccacgcttaagaaattaaaggaagaactgggtatggcataagctgagtatggagttcggcggagcggggcaaaaaagcccttcagccggactcccttcatatcgaaaacgcggatgggagaggctgacatgaaactttgctttaatgaagcgactacgctggagaattcaaacctgaaacaggatttagaactgtgcgaaaagcacggctatgattatattgaaatccgcacaatggataagctgccggaatacttaaaagaccattcactggccgatctggcggaatattttcatacccatcatattaaaccgcttgccctgaacgccctggttttcttcaacaatcgtgatgagaagggttatagggagatcatttcggaattcaaaaaaatgatggaaacctgcaggacgctcggcgtgaaatatgtggtggccgtgccgcttgtgacagagcggaaaatcttgaaagaagaaatcaaaaagagcagcatagaggtgctgactgagctttcggacatcgcggagccgtacggcgtaaacattgcccttgaatttgtcggccacccgcaatgcacggtcaatacatttgaacaggcgtatgacatcgtgaacgctgtcggccgcgataatgtcggactggtgtttgacagcttccatttccacgcgatgggctccaatattgagagcttgaagcaggcggacggaaagaaaattttcatctatcatatcgacgatacagaagactttccgatcggctttttaacggatgaagaccgcgtctggcctgggcagggtgcgattgacttagacgcccatctgtcagcgttaaaagaaatcggattcaatgatgttgtctccgtagagctgttcagacctgaatattataagctgactgcggaggaaacgatcaaaacggcaaaggaaacaacggaagccgtcgtatcaaaatacttcatgaaggaggcgtgaacatggcttttgtcaccatgaaacatcttcttgcagaagcgaaacgggagcattatgcagtcggccaatttaatatcaacggcctccaatggacgaaggcgattctgcaagcggcgcaaaaggagcaatcgccggtcatcgccgcggcttccgatcgtctggtcggctatttaggcggatttaaaacgatttccgccatggtcggcgcgttaatggaagaaatggcgattaccgttcccgtcgtgctccatcttgatcacggaagcagtgcggaacgctgcagacaggccattgacgccggattcagctcagtgatgattgacggctcccatcagccgattgacgagaatatcgcgatgacaaaagaagtcaccgattatgccgcaaagcacggcgtctcagtagaagccgaagtcggcacggtcggcggcatggaagacggacttgtcggcggggtctgttatgccgatatcatggaatgtgaacggatcgtgaaagaaaccaatatcgacgcgctggcggccgccctcggctccgtccacggcaaatatcagggcgagccgaatctcggatttaaagaaatggcggctatctcccgcatgactgatattcccctcgttctccacggagcatccgggattcctcaggatcagatcaaaaaagccatcacgctcggccacgcgaaaatcaatatcaacacggaatgtatggtagcctggacagacgaaacacgccgcatgtttcaggaaaacggcgatctgtacgaaccgcgcggctacatgacacccggccttgaagccgtggaagagacggtgcgaagcaaaatgagagagttcggatcagccggtaaagccgtaaaacagcagatcggctgatgaaaacggaaaccgccaagatggcggtttttttgtgcggtgttgcgtccgtacgcccgaaacgattatgatgatggcagcagtgtaagaaacgggagtggttcagtttgaataaaatcatgattgtggaagatagtgaagacattcgcggactattgcagaattaccttgaaaaatacggatatcaaaccgtggccgccgcggatttcacggctgttcttgatgtctttttgcgggaaaagcctgatgtggtgctgcttgatatcaacctgccgtcttatgacggctattattggtgccgccagatccgccagcattctacaagcccgatcattttcatctcagccagaagcggggaaatggatcaggtgatggcgattgaaaacggcggagatgattatatcgaaaaaccgttttcttatgatattgtgctggcgaaaatcaaaagccagatccgcagggcatacggagagtacgccgccaagcagggagagaaagtggttgaatatgccggtgtgcagctctttgtggaacggtttgaactgcgctttcaggacgaaaaaagcgagctttctaaaaaagaaagcaagcttttggaagtgctgctggagcggggagaaaaggtgacgggaagagaccggctcatggaaaaaacgtgggacaccgacattttcgtcgatgataatacgcttaacgtgtatatcacgcggctcagaaaaaaactgcgggagctgaacgcgcctgtttccattgaatcggtgcggggcgaaggctaccagctgagggcgctgtcatgaagctgtttctccggtctcatgccgtgctgattctgctttttctccttcaagggctgtttgtcttcttttattactggtttgcgggtcttcattctttttcccacctgttttacatattgggcgtgcagcttcttattttggcggggtatcttgcctatcgctggtacaaagaccgcggtgtgtatcattggctcagctcggagcaggaagggacggacatcccgtatctcggttcttcagtgttctgttcagagctgtatgaaaagcagatggagctgacccggctgcagcaccagaagctctacgagaccgaagccaagctcgacgcgcgggtgacgtatatgaatcaatgggtgcaccaagtaaaaacgccgctgtcggtcattaatttaatcattcaggaagaggatgagcccgtctttgaacaaatcaaaaaagaggtccggcagattgaattcgggctggagacgctcctttattcatcaaggcttgacctgtttgagcgggattttaaagtcgaagcggtttccttatcagagcttctccaatcggtcattcaaagctataaacgattttttattcaataccgcgtctatccgaaaatggatattcgcgatgatcatcagatttacaccgatgccaaatggctcaaatttgcgatcggccaagtcgtcacaaatgcggtcaaatattcggcaggcaagagtgacagactggagctgaatgtcttccgcgatgaagacaggacgatgcttgaagtcaaagattacggtgtcggcattccctcgcaagatatcaagcgggtgtttgacccttattacaccggcgaaaacgggcggcgtttccaagaatctacgggaatcggcctccatctcgtcaaagaaattacgggcaagctcaatcatacggtggacatcagctcgtcccccggtgaagggacatcggtccgattttcatttcttacaaaaatgtaagactgcgttaagaaaacaacatagctcattctgtttccccttgataacatggatttacgtcaaggggatttttatgctgaatgccccggcactacatgaaagcagcccagatcaacaagaataaaaccataaggaggattctcatggcgaatatgcttgaagtcaaacatataaataaaacctataaaggacaagtatcctatcaagctttaaaacaaatttcattttcaatagaagaaggcgggttcacggcggtgatgggaccgtccggctccggaaaaacaacacttttgaatatcatttcaacgatcgaccggccggattcaggcgatatcctgattcacggagaaaacccgcaccggctgaagcggacaaagctcgctcatttccgccgcaagcagctcggatttgtgtttcaggatttcaatcttctggacacgctgacaatcggtgaaaatatcatgctgccgttaacgcttgaaaaagaagcgccgtctgtcatggaagaaaaactgcacggcatcgcgaaaaagctcggaatcgaggacctgctcaataaacggacgtttgaagtatccggcggacagcgccagcgggccgccatcgcaagagcggtcattcataagccgtcacttattctggccgatgaaccgacgggaaaccttgattccaaagcgtcaaaagatgtcatggaaacgatgcagagcctgaatcaggatgatcatgtcacggctttgatggtgacccacgatccggttgcggcaagctactgccgccgcgtcatctttataaaagacggcgaactgtttaatgagatttaccgcggggaaaaccgccaagtcttttatgagcagattcttgatgtgctgtctatgctggggggaaacgcaaatgacctttcttcagttcgcttataaaaacgtcacgagaaacaaaagggcctatcttgcattcttcttgagcagcgccttttccgttttgattttctttacctttgcgatgttcctgtttcatccggcactaaaggaaggctacctgaataacatcgccaaaaaaggcttaaccgccgcggaatggatgatctttgttttttctttcttatttgttctgtattcggttaacgcatttttgaaatcgagaaataaagaattcggtattctgctgatgcagggtattacgccggtgcagctgagaaagctcattacggcggaaaacatgatcatcggcgtcatgtcgatcgcagcggggattatcggaggcttcattttttcgaaaacgttctttacggtcggcgcttatattttagaaatggacgcgctgcctctgtacatgccttggaaagcgctcggcattacggccggcggatttctgctcttatttttccttttatcgcagttcacgatcctttttgtcagatcaaatacggtgatcaaattaataaagggcactgacaagatcaagccggagccgaagccgtccgtgcttctgtccttattcggcatcgcctgcctgtgcggcgggtacggcatggttctgaaaggcaatgtccacgggaccgagccgttcatcattttactgcttaccgtcatcggcacgtatttctttttcagccaaagcagcatctggattctgcgcgcgctgaagaagtggaaaaccttttatctgcgcgggaaaaatgttatttgggtttctgaccttgtctatcgtttaaaagacaacgcccgcctgttctttatcgtcagtattatttccgcggttgcctttacggcgacgggcgtgctcgcgatgtacaaatcgaccgtcggggcggaagagtccgcctatgagatggagtatttatctttcagcaataacccgaaagaacagactcatttgaaagatattgaccatgaactgaaaacacacggctttacgtataagaaagacaaaatagatgtttcctatgttcgctatcaggaaggagaaactgttccccctgtttatatgatcagcgaatcggatgtatcaacatacttccatgttaagctgaacggcctgaaacataatgaggctgtctatttcccgggcacgtatgaccgcaatttcaaaaacgacgcgccggatcagctgaagctgctgaaccaaaaaggcaagccgtctgaccaaaaactgacggtaaaagaagtcaaaaaaccgctgatttcattgaatgccatcatcgcggtgaacgatcaaacctttgatcagctgaaatcactcggtgagaaagcgtcattatacggctacagctatgatcattggaaagacagtcttgggatcagccaatccttgaaaaatgagatttacggcaactatatcgacgtgcattctgattttatggcaaaagccgggacgtactatgatacggtgcagctgccgagcctgagtttattcatcggcctgtttatcgcgatcgttttctttgtcgcggcagcgagtttcttatatttcaggctgttcaccgatttagatgaggaccgggagcgctaccgctcattggccaaaatcggtctgagtgagcgtgaaatggcacaaagcgtgacgatacaattggcgattctctttttctttcctttcgtcattgccgtcatgcatacgctgtttgctttgagaacattagcggtggaaggctattccgatgtagcggggccgctcagtctgaccatcggagggtttttcatctttcagcttctgttcttcctagcggtgcggacaagctatttgaaaaaaatgaacaagtaaggggagtgcacagatgaaaaaagcattggcaatcctggccgtcttagcagccgctgccgtcatatacggacttctcttttttcataatgatgttacagacagatttaatccgtttattcaccagcaagatgtttatgtacagattgatcgagatggcaaacatcttagcccgggcggtactgagtatacattagacggatataacgcatccgggaaaaaagaagaagtgacctttttcgccgggaaagaccttcggaagaacgcgtatttgaaggtgaaggcgaaaggaaagtatgtcgagacctgggaagaagtcagatttgaagatatgccgggctccgtacagtcaaaattaaagtgaacatgaaaaacggcacagtgtcatgactgtgccgctttttttattttttattttttattttcttcagcccgtttgatcagcatgtcggtgatgatatccatctgtttgctgacggcaatcgggtcatacggatagaaggtgttgaaatcgttgataaagacacggttgttctttacggcatcgagatttttccaaacggatgactctttcagacgctcaaatgttttgctttctccattcggattgtaatcggtaatgaacatataatcagccgcatattgagggatgacctcttgggaaacctgtttcatggcgcccgttttcatgatgtctttttcgattttggccggcgctttcaatccgagtgcgttataaacggcttggccgccgcggccggaattgtcattaaaaatccagatttcgcctttatccgtcgtttcataaaggccgactgtctcgtctttgccgatcacgtttttgaggcgcttttgatcggcttcagcctttttgttgaagtctgccataaagcttttggctttatccttcgccccggcaatgtcgccgaataggctgaccgtatctttcgtattctttgcggtgttaaaaggaatgacaatcgtcggtgcgattttcgatagtttctcgtattggtcatccttcatcagcacgattaaatcaggcttcagctgcatcactttctccacattgacgggattgccgatgtccgtggtgtttttcagctgttttttgataaacggatttttgaaagcccatgagcccgccccgacgacatttgcgtcaacggacagcagctcacccgcataaaagtcagtgacgatccgttttggatgtgcgggtatgtcaatatttccttttgttgattcatatgtacgcatgtctgtctttcctttgcctgatgccgatccgttgttttccttcgcgccgctgcaagcgcttaatgcgaaaacaagcagaagtgccaggccgatcagccatgattgtttcttcataatgatccccctatttcggtgataatgattatcattattaatatagcaggaagacgtcattccgtctatgttttttatagaaaaccttccttgattatccatgttatagtagtaaaggaggaggaatgaatgttgattacgaaaagagggacttggtgggaagtgctgcacagctggtggctgctgctgactttcgcgccgtttgggctgaccgctttcttggcctttttctatatcggctaccgggccaagaacaaaaaatggctgaaatacggacttatctattttattattttagcaattgcttttgtgctgccgagcacgccgggcgtgtatatcgtgctgcctttatgggtcatctccatcatccacgggctgaaagtgcgggcggcttatttaatacagcttgatgtgtttaaacaaaacgtcgaagcaagagcgtttgaagcggtaaggcatgaggcggaggaaaaattcggcggaaaacccgctcaacgcattgatctgacaaaacagagataaaaacaaatgacaaagccggtatctcgcgctttgtcatttgcatgaccggcctattgctggtatgaatgctgctgaaacggtgtgtgtgatgctgtgtttgcgggaatgaagaaacattagcgtttgccatcggtgcaggcatgtgtccgcttacttcctgctgaagctgattgcacacattcacgatttgctggcatttctgaatggccagttcatgcccctgcagcgcttgctgaatggtatgaacggcatgctgttcatggttaagcatctgctgaagcatttgaatgttttgctgttcctgctggagcatttgcttgtactgctgactgctttgctgtgtctgctgaataagctgctgtgctgtttgacggcattgctgcagctgatttccgctgtattggttttgatacatcatgaagacctcctgaagtgattgattttacacatttatcatgtgaaagaataggagaggcattcatgcaagaaaaggattcaaatatttacctgttatgtacagagcggaatacaaggctcgggatggcctgtcgagctttgtattccggccctttttctcagaagccgccttctgtagcgtgaaaaggaatattgagtctgttttcgactgcgcgcaggcgctgattcaaacggtttaagcggcgggtatggatttcaatggactggctcagccgtctgatctgctcattcatacgcgtgatttcccggttttggcgctggtcttcttgtgagaggcgggtgagctctctcgtttgctgggcgttttgtctttcaagctgggcgactctccgttctaaagccgtcggctgccgctcttcagactgagggggcgcataataatagctttcctgctgctgatacggctcatactcaacggggctcacttcgtattcctgctgctgagggaaataggcagatggggtgtagtactgatatgggttcattcatcattctccttatctagtgaagtctttatacactatgtagtcaattgcacagtgccacggcatccgcctaacttacaggcgtaaaaagagcttcaaaggaaggtgatcatgttgcggaacatacggattttcatcatgacggttcttgttatcggatgcgtcatgataacaggctgctcgcaaaagaaagcagacgaaccccctttttattacgggacatgggatgcggggctgaaaccgggcccgatggacggggtcagatctgaaaccgttacgtttacgaaagacagcgtgctgacaaagcaggtcattaaaggccgcggcgaggttcccatgccctcagatgcttacaaggtggtctcacaaaacacggacgggacgatcgagattgaatacctcggacatccgcaccccgtcaaaagcacgttgaaaagaggaaaaaacgatacgctcatttggaagatatacggagaaacaaaaacaatgacaagaataaaaaccggcggggaggatgcacatgagaaataaggctgccgacagactcgttttgacgggtgtcatcgtacatatcattcaatggttttcactgttatggttattttttatgctttttgatcagttcgggcgttttaccatttataatcccaatgtcgtcaacggcagcatgcagtctttttcattctttgatatgatgcgcgctcttctgttttccggcacgctgcggaatacgctcctgctgtttctgtttgcggcgatgctcatttacttgtgggtgaacgctctgtttatcctgctggaaatcgtttcttatatcatgatcaggcggaacagccgttcattatgggcatactttcccgcagcgatgggaataaagcttgcccttctggacatagcggccgtccctttctttgcggcggggctgatgctcttgaagcagaaaacagatgacagcggcgaacaagctgacaaggggaaaagacggccccgcatccggaggcaggcccggtataggaagagaaggcggagaaacttgtccgtttgatttttcattgaaacgaaaaaacgatatgatgaaagcataagcagaaaaggatacaaaggagatgcaggatgtacaagttaatcgcaatagatatggacggaacactattaaacgatcatcatgaagtgacggctgaagtccgcggggcgcttgatgccgccaaagcggaaggggtcaatatcgtcctgtgcacgggccggccgatcggcggcgtgcgtcggtatttggaagagctgaacttacaggaagaaggagactttgtgattgcctataacggcgcactcgtccaaaatacgtatacaaacggtgtcgtggccgagcagtcattaggctttgaagatttggagtcgctttacgagctgagcttacagttggatactccgatgcattactttgacacagccaatctgtacacgccgaaccgggatatcagtgaatacacggtatacgaatcatacattacgaaagtgccgcttcatttccgcacgatcgatgaagtgccgaaggatattctgattccgaaagtcatgttcattgacgatccggacaagctggagaaagcgatcgcttctattccggaatcattcagggaaacatacacaatggtcaaaagcgcgccattcttccatgagattcttcacccgaaagtcagtaaaggaaacgcggtcaagctgctggccgaaaaactcggcattgaacagaaagacgtcatggcaatcggcgataacggcaacgacatgtccatgattcagtgggccggctgcggtgtggcaatggccaatgccatcccggaagtaagggagattgctgattatgaaacgaaatcaaataacgaacacggcgtggcgcacgcgattcaggagcttgtgctgaaaaaataggcaccccatcagagggtgcttttttaccgcgtgttttggtgatatgataagcggagaggggaggcgcgacatggatcgtgaaaaacagcagctcagcatagaagcggcaaaactatattatcaatcagattacagccagcagcagatcgccgaacggcttaatctgtcacgccccaccgtttcaaggctgcttcagtacgcaaaggaaaaagggtatgtgcaaattcgcgtcatggacccgtttgaggatctggatgaactcggcgcgaagctggaagaaaaatacgggctgcttgaggcgcacgtcgtcttttctccaagcgacgattaccaggccattacacattacttaagccgctatggcgcagactatatgcataaaaccgtaaaggacggcgatatactcggcgtaagctgggggacgacgatgtaccagatcgcaagccgcatggagccgaagcaggtaaagagcgttgaagtcgtgcagctgaaaggcggcatcagtcattccaatgtcaatacgtattcgtcagaaacgattcagctgttcgccgaagcatttcagaccatgccgaggtatttgccgctgccggttatatttgacagcgccgatgtgaaacagatggtcgagcgggacagacatattaagcggatcattgaaatgggcagacaagccaatatcgccctgtttacggtcggaaccgtccgggatgaggcgctgcttttcagactcggctatttccgggaagaagagaaacaattgctgaaagcacgcggagtcggcgatatttgttcgcgcttttttgacgaggaaggcaggatttgcagcagcagcattaacggcaggacgatcggagttgagctcagcgacctgaaattgaaagagcgttcgattctggtggcgggcggcagcagaaaatgcaaggccattcacggtgccctgaaaggaaagtacgccaacgttttgattactgatcagcatacggccaaaaaactcattcaagaattgtgacaattcatgaacataatttcaattaccaatttacatatgttcaaaattcggttattctaaacgtatcctaggaaaaaggaagtgcatacaatgtcaattgcaagtcaaatagaccatactgctttgaaaccgcatacacaaaaagcggatattttacaactgataaaagaagcaaaagaatataaattcgcttccgtttgtgtgaacccgacttgggtcaaactcgcagcggaggaactgaaaggcacgggagttgacgtttgcaccgttatcggatttcctctcggcgcaacgacatcggaaacaaaagcatttgaaacgaaggatgccatctcaaaaggagccactgaggttgacatggtcatcaatatcggcgcattaaaagacggcgatgatggagcggttgaagctgatatccgcgcggtagttgaagcagctgataaaaaagcgctcgtcaaagtgatcatcgaaacatgccttttgacagatgaagaaaaagagcgtgcgtgccgcttggcggtatccgcaggcgctgatttcgtcaaaacgtctaccggtttttctacaggcggggcaacggctgaagatatcgctctcatgagaaaaacagtcggaccggacatcggggtcaaagcatcaggcggcatcagaacaaaagctgatgttgacagcatgatcgctgcgggcgcgagccggatcggcgcaagtgcgggcgtctctatcgtgagcggcggagacagcggcagcagcgactattaatcagcattgcggaagccgaaagcttccgccatcctctttctttgttgatgcataaaaaattgtaagcgaatacaaataaaaggagaacacatatgaagtatctcatcggaattatcggaatcattgtgtttttaggtcttgcctggcttgccagcaacggcaaaaaaagaatcagaatccggccgatcgccgtcatgctcgtgctgcagctgattctcggttatattctcctcaacaccggtatcgggaattttcttgtcggcggttttgcaaaaggatttaactacttgctggaatatgcatcagaagggattaactttgtattcggcgggcttgtgaatgcgaaacagacgacgttcttcatgagcgtgcttctgccgatcgtctttatatccgctttaatcggaattctgcagcattggaaggtccttcccttcatcacgaagtatatcggtcttgcgttaagcaaggtgaacggaatggggaaaatcgaatcttacaacgctgtcgcatccgcgattttagggcaatcagaagtctttatcagtttgaaaaaacagctcggctatcttactgaacagcgcttatacacgctttgcgcgtccgcaatgtcgacggtctcaatgtcgatcgtcggttcttacatgatgatgctgaagcctgaatacgtcgtgacggcgcttgtgctgaacttattcggcggatttatcatcgcttctatcatcaacccgtacaccgtcagcaaagaagaggatttgatcttcgttcctgaagaagaaaagcaatccttttttgaagtgctcggtgagtatataatggatggattcagagtcgccgtcgtcgtagcggcaatgctgatcggatttgtcgcactcattgccctggtcaacggcgtttttaacgcggtcttcggcattacattccaggcgctgctcggatatgtattcgcgccgtttgcgtttttaaccggtattccgtggaatgaagcggtgagcgccggaagcattatggcgacgaaaatggtatcgaatgaatttgtggcgatgcagacgctctcatccggcgatttccatttcagcgcgcatacacaggcagtggtatctgtattccttgtctcattcgcgaatttctcctctatcggaatcattaccggtgcggtgaaagggctgcatgaaaaacaaggaaacgtcgtcgcgcggttcgggctgaagctgctgtacggcgcaacgctcgtcagtttcctgacagcggcgatcgtcggattgattcactgaacataaatgaaggacaggtgatagatcatgagaatggtagatcttattgtaaaaaaacaaaatggaaaagaactgacaacagaagaaattcaatttttcgtaaaaggatacacggacggaagcatccctgattaccaggcaagcgcgctggctatggcgatttactttcaggatatgacggatcaggagcgcgccgatctgacaatggcgatggtcaattcaggggaaacgattgacctctccgccattgaaggcattaaggtcgacaagcactctacgggcggggttggcgacacgacaactctcgtactcgctccgctcgtcgcggcgctcggcgttcccgtcgctaaaatgtccggccgcggccttgggcatacggggggaaccattgataagctggaagcgatcgaaggcttccacgtggaattgtcaaaagatgaattcatcaagcttgtgaaccgcgacaaggtagccgtcatcggacaaagcggcaatttgacccctgccgataaaaagctgtatgcgctgcgtgatgtaacgggtacggtgaattccatcccgctgatcgcaagctcaattatgagtaaaaaaatcgccgccggagcagatgccatcgtgcttgacgtcaaaacgggagccggcgcgtttatgaaaacggatgaagacgccgtgaacctcgccaaagcaatggttcgcatcggaaacaacgtcggccgccagacgatggccgtgatttctgacatgtcgcagccgctcggttttgcgatcgggaatgctctggaagtgcaagaagccattgatacgttaagaggggaagggcctgaagacttaaacgaactcgtcctcacgctcggcagccaaatggtcgtattggcgaaaaaagctgagacattggaagaagcgagaacgaagcttcaggaagtcatgaaaaacggcaaagcgcttgaaaagttcaaagagttcctgagcaatcagggaggagacgcttctgtcgttgacgatccgtccaaacttccgcaggcggcgtacaaaattgacgttccggcaaaagaagcgggtgtcgtttcagaaatcgtcgctgacgaaatcggcgtcgcagcgatgctgttaggcgcgggacgtgcgacaaaagaggacgaaatcgaccttgccgtcggtattatgctccgcaaaaaagtcggtgacaacgtcgaaaaaggtgagccgctcgtcaccctttacgccaaccgcgaaaacgttgacgacgtgaccgccaaagtctatgacaacatccgcatctcagaaaaagcggaagcgccgaaactgattcatacgctgattacggaataagacaaaaaaggcacatacctcatcagtatgtgcctttttttttatggcatggttttatccaaatgaatgtcacggacggattgtttcggctgtttctttctcaaaaaacgaatgagatagcacaggatcatacaaggaattccgcagaagagggcgattctttgattgggatcaaatgcaaggcctacgcatgaagcgaaacataagatcacagcggcgatcggaacgagagggtataacggcgtgcggaaggtcagatccgcgacgcgtccgccgtttttcacataatgttttcgaaataacagctgagacagggcgatgctcatccacaccacgacgccggcaaatccggctattgccacgagcaccacgtagaccgtgcccggggcggcgatgcttgagatcaaggatatgcaggaaacggccatgctggcgagcagagcattcagcggaatgcctttcggcgtgacttttttgaaccgggcgctgatcatgttttcattcgcaagagaccacagcatccgggtggaagcatacagtccggagttggcgaccgaaagcaaagccgttaaaatcacgaagttcatgatatctgcggcgtatgggataccgatctgggaaaagaccgcgacaaacggactttcaatcacaccggcttccttccaggagatcagtccggacagcacaaaaatggcgccgataaaaaagatgaccgttctccaggcgacatttcggatcgaacgcggaatatcttttgccggattggcggtttcacccgctgtaattccgatcagctccgtccctgaaaaggcgaagcttacggaaatcattgcgatgaaaaccgcaagaaagccgttcggaaacagtccgccgtgtgaggtgaaattcgacagcatcggagcttcacccgaaccgtgcaatgaaatcaaaccgaacatcgcggcgccgcctaagatgataaataaaaggatggtgacgattttgacgctggaaaaccaaaactctgtttctgcaaacaatttaacggagaatgcattggcggcaaaaaggagagccgcgaaaatcgcgctccacatccagacgctgctgtggggaaaccagcgctgcatgaggataccggaagctgtaaactccgatcctaccgtcaccacccaattcacccaatacatgataccgaccataaaacccgtggacggcccgataaacgttgtcgcatacgtttgaaatgaaccggtcacaggcatggctactgacaattctccgagacactgcatgacaagatacatcatcaagccgccgatcaggtaagcggcgatcgtcccgcccggcccggcctggctcaatgtataccctgtgctcaaaaacagccccgtgccgatgacccctcccaatgaaatcataaataagtgcctgcttttcatcgtgcgctttagttgattgccgccttgatcaacatccatcgtgatctccccctttttgcgtggcatgagaatcttccggcagccgagatcacgcgtgccggatttgactttaacgtgacaatttaaatcccttcaatgcatgtaaaatgacgtgtgcggctgcccggcttgtcatatcgcgaaaatcaagtgtcggatcaacctcaacgatctcaatacccgagatgtcagcctcctgggctaaaaaccggaccgcctgaagcagttcctcggtatacaggcctccggggccgatcgcaggacagccgggcgcatgagcttgatccagcacatccatatcaaccgaaataaaaatggcgtcggctcttttttgaacggccggcaaagtgtcttgtatcgttcggagaagccctttctcccggatcatctccattgtatgcacgtctgcctgacgctcttttacatatttttcatatgccaggctgttgctgaactccctgattccaagctgaatcaggttttgtccgcttatgatattttcatctaacagacggcggaatggcgtgccgtttgtcggccctccgtcttctgtgttgcggacgtcgtggtgggcgtcgaattgaaagacggccgttgttcctttcgtttccgcaatggctttaatggtggaataactgatggagttgtcgccgccgagaatgacgggcacccagtcaggctggtccgtcagaatatcataaatggtccgataaatgtgttcgtgagatttgacgacatccgtgacgtgaatctgaatatcgccgatatcgtacagatggtcaatgacatgctcccgcagctccgcggaatatgcggaaatgccgccgagcgcccggcggatcgcaccgggggcaaagcaggcgccggaatggctgattgacgacttagaaagcggaacgccgatcaaagccggccctttgatcgtttgtcccgcccacgcttccgtcacatcgccgatccttgtcacatggcggtcgttgaagagggagccggctttttgcagaaacggatacttatccaagagcggctccctcccttgaaacgaccgtcttcccgttcttgatgacacggcggacatgattgacgccgtaatgatacgggatatacatgtaattcggcgcttcccaaatgacaatgtcagccgcccgtccggctttgatttgtccggcctcttcgccttttccgatcgcatacgcagcgttaacggtgacagcgtgccagatttcttctgcggtcatttttaaatgaagcgcggcaattgacataatgagctggagattttccgtcggtgagctgcccgggttgaagtcagtcgccaaactgacccgtacgcccgcatcaatcatctcccgggctctcgcataagtgtgttttccgagatagaaagtcgtgcccggcagcaggacggcgatcgttccggactccgcaagcttttcgatgccttcgtcagatgcccccaccaaatgatcggcagaaacagcatgcagctctgccgccaattccgcgccgccgagcgggtcaatctcatcagcatggattttcaggccgaaaccagcttcagccgcctttttcaggtagtcccgtgactggctgacggtaaagacgcctgtttctgtgaaaatatcggcaaattgcgcaaggcctttttcttttatgtcaggcaaaagctgcagcatgcgattcagaaattcgtcagggctgttccggtactcaggcggaatggcgtgtgctcccataaaggtcgtgacaaggtcgaccggctggcgctcacccagttttttcgccgcggtcagctgtttcagctccgtgtctttgtcgagtccgtacccgctttttacttccgcggtcgtgatgccgtatgacagcatgcgtccgaggtgaaaaagccctttttcaatcagttcttcttcggaggcggctttcgtgtctttgaccgttgacaaaataccgccgccttgcgccagaatatccaaataagacatgccctgaatttttaaattcagttctttttcgcgggaccctccgaatacaagatgggtgtggggatcgacgaggccgggggtgacgagccgtcccccgcagtcgataatgtctcctgcctcgtatcctttctccgctccttgatgtccggcaaaaacaatgcgcccgtcgtgaacgccgatgacggcattttccgtgacatgaagatcctgcatgctcccgccggatcgggggccgccggattccatcgtcagcagctggccgatgttggtgagtatggtatctatttgtttcggcatgttaccgctcctttttcatcggtatcataatgtcttgttcctcggcgacttgaaccgctttttcataacctgcgtccgcatggcggatgatgcccatacccggatcgcttgtcagaacgcgggaaagccgttgttccgcaaggatgctgccgtcagcgaccgcgaccattcccgcgtgaagggaataccccatgccgacgcccccgccgtggtgaaaagaaacccagcttgcgcctgaggccgtgttgatcagcgcgttcagcaccgcccaatcgccgaccgcgtcgcttccgtctttcatcgcttctgtttcccgattcggagaggcgacagatccgcagtctaaatggtctcttccgatgacgatcggggctttcagctcgccgtttctgaccaattcattgatggcgagccccatcttttcccgttcaccgtagccgagccagcaaatacgggacggcaggccttggaacgtgacttttttctgcgccatgtcaatccagcggtggagggcttgattttctggaaacagctcttttaataaagcgtccgtgcggtatatatcttcagggtcaccggacagcgcagcccagcggaacggcccttttccttcacaaaataaaggccggatgtaggccggaacgaatcccggaaaatcaaaagcatcggcgagaccctcatctttggcagcctggcggatgttgttgccgtaatcaaagacgatagccccttttttcttgaaggcgagcatggcttccacatgctttttcatactctgcttggaaagccttacgtataaatcaggctgatcccggcgcaggcggtcggcctcctcaagtgagtatcctgccggaatatagccgatcagcgggtcgtgagcggaagtctgatcggtcacgatgtcaatatggacgccgcggttcaaaagctcatgatgcacctctgccgcattgccgagaaggccgatcgataaaggttctccggcttgtctggctgtttcggcccagcgcagcgcttcgtcaattgatgcggttttccggtcgcaatagtttgtttctatccgtttatcaatccgtgtttcatccgcttcaacggcgatgacgacgccatcattcatcgtgacggacagcggctgggcgcctcccattccgccaagtccggccgtcagcgtaagggttcctttcagactgccgccgaaatgctgtctcgcaagctccgcaaaggtttcataggtgccttgcaaaataccttgtgaaccgatataaatccagctgccggcggtcatttgcccgtacatcatcagtccttttttctcaaggtcatggaaatgctcccaatccgcccatttcggcacgaggaccgaattagccagcaggacgcggggcgcgcggctgtgcgtgcggaacagtccgaccggttttccggattggatcagcagtgtttcatcatcttttaacgttttgagggagcgctcaatcgcgtgaaaagcatcccagtttcgcgcggccttgcctatgccgccgtatacgatcagatcctccggcttttcggcaacctccgggtcaaggttgtttcggagcatgcggagcacggcttcctgctcccatcctaagcattcaagttcggtgccgcggccggcgcggattgatttctttacatcagtcatcttgtaagtcctccttcattggtcatcagtttttggtgatgctcattcggcagaaaagactccttcttcagccagtcactcagatgttcgatgtcataagaaaacacgcggtcttcttgtatggacggcacgatgtttctcatttcgagatagagctgttttgtgtacgaggcgcaatgttccgcaccccggtattccacggcctgcagcgcgcaaatggcttcaacggcaagcacccgtctcgtattcgcgatgatctggtaggcgtgccttgaggcgatggttcccatgctgacgtgatcctcctggtttgccgatgaaggaatggaatcgacactggcgggatgggccagggttttattttctgacacgagggaggccgccgcatattgcatgatcatcgctccggattgtaagccgggctgagggctcagaaagggcggcaggtcattcagctgcggattcacaagccgttcgatacggcgttcagaaatattcgcaagctcggccgccgccactttgagaaaatccatggcaaaggcgatcggctgtccgtgaaagtttccgcctgagatgattttggcgccgtcttcgaaaatgagcgggttatctgtcgcggcattcatctcaatttctaatttttcttttacatacgctaatgtctgccatgatgcgccgtggacttgaggaatacagcggatcgaataggcgtcctggacacgcagctccccttggacggtcgtcagcttgctgtctgacaagtaatagcggattcgctctgcgacatccatctgttcctgatatccgcgggcggcatgaatgtcctcgtcgaacgcatcgataatgccctgaaggccttcgatcgttaagctcgcgatccgttccgactgataggccagcttttcggcctcgaggtaagcgatcagtcccatcgcggtcatggcctgcgttccgttgatcagcgcgagcccttccttagaggtcaggacggccggctgaaggtttgtcttttccaaagcatgagctgccggcatccgggccccttcgtaaaagacttcgccttgcccgataagcgccagtgcgagatgagaaagcggcgccaaatctccgctcgcccccagtgacccttgctgcgggatgaccgggtgaatgcgatgattgagaaacgcgagcagttgatcaatcagctcagtccgtacgccggaaaagcctttcagcagggcattggcgcgcaaaagcagcatggcccgcgatacagattccggaaacggatcaccgacgccgcacgcgtgagaaagaatcagattcagctgcagatccgcggcgtcttctttttgaatcagcacatcgctgaacttgccgaaccccgtcgtaatcccgtaaatggtcttctcttcttgaacgatccgttcaaccgccgccctgctttttttcacacgttccatgctttcggcagatgcttgaacctcttcaaaatcaaacagcacacgctgggcatctgcggttgtcagtgaggaaccgtctaacgttaccatcatttcaacccctttttctttactttggtaaagcgcccatacaaaaaggagctatgccatgaaaatgatatttcacgcatagccccctatcatctgatatctatgggctgattcatatgtgattaattccgactccgaatgtttcgtgctcaagccccttaatcggagctccgatcgtgccgtaaagggaaacggcgatccaatcgccttccgcctcgctttcatacggatttccccgcaagacggcaaacttcaggcccacggtacgaagcagcgagccaagcagcatttcgccccgcgtcactccgtgcaaagcttccattgtggcatgatacagcgcatgtgattcgcgataaccctcagattgaatgacgccgctctttttggaagcggtttcaattgcagctaccaccttatgcgcatccattgaacccaccctgccgagacagactttccagccgtcccgttccagccggctgatctgctggttttcttcagtctcatgaagcagaagaaggacggacaatcgcccgatgcggcggtctttgtgtaaggtcatatatgcttcactcaattcttaaatattctgataactagtaactgttttttatattaagtgtttgcgaatcagaagtcaaaactttttttccagtctttcacaaatcagattgctattgtattaaagcggtacatcgggaagccggcgctgttgatcacatatttccgccatccgcgtcataaaatagagcgttgtcttgaaagcgttttaagaaaagaagagagcgaggagatttcagaaaatgaaaaccagtttctttcgtgtgtgcctggtctcagcagcggttatcgggttcactctgccgcaggcaaaagcccagcatcccgttttttcagaggtcagcgtgcatgatccgtccgtcatcaaaacaggcgatacatactatgtattcggctcgcatttggcttccgccaagtcgaaaaacctgatgcagtggcagcaactgtcttcaagcgtcaatcccaataatcccctgatcccgaacgtctactccgaattaaaagagacattcgactgggcccagtctgatacgctgtgggcgccggatgtggctcagctggctgacgggaaatattacatgtactataacgcctgtaaaggagactcgccgcgatccgctctcggtgtcgccgtgagtgacaaaatcgaaggaccctacaaaaacaaaggcatctttttgaaatcaggcatggaaggaaaaagcgaagacggcacgacgtatcatgcaaacgttcacccgaacgtcgtagatccgcaaacgttttttgaccataaaggcaagctctggatggtgtacggctcttactccggggggatttttatactggaaatgaatccgaaaaccggtttcccgctcccgaaccaaggctacggaaaaaaactgctcggcggaaatcacagcagaatcgaaggcccgtacatcagctacaatccggaaacgaaatattactatctgtatctgtcattcggcggacttgacacagccggcggctacaatatgcgtgtggcgcgctctaaaaatccggacggtccgtactatgacgccgcaggccataacatgcttgacgccaaaggaaaagacggcagtttcttcgatgacaaagcaattgaaccgtacggggtcaaactcatgggcggctacagcttcgcctcacaatctgaaaaaggcacgggctacgtttcaccgggacacaactccgtgttttacgacgggaaaacgaaacgatcatacctcattttccacacccgtttcccgaacagaggcgaagagcacgaagtcagagtgcatcggctgtacatgaacaaagacggatggcccgttgcagcgccgtaccgctacgcaggagaaccggatacacacatatcggcagccgccgcatccggagcctacaaactcatccagcatggaaaagacattacagctacgatcaaaaccccaaaaaccatccggcttaacaacgacggcaccatttccggggaaatgaccggaacctggacaataacgaacagcagcaaagcccgaatcaacctgaacggcacacattatgacggtgtcttcctgaaagaatgggactcagcgagagagaaagaagttgtgacgtttagtgtgctgagcggtgatggggaggctgtttggggagtgaagtgaaaaagcacctactccagtttggagggtgcttttttcttgctaattaggagaatgaccttctattgcttttaataaaccatttgaattatgatggactcaacctctatcgtttacagtgaacagtataaaattgataacaaaaatatgaatacatacctaagaaaaaacgaaaggaagtttaattttgaaaaaaacaataaaagtagccgccgcagttatacaaaatgaaaacaatgaaattctatgtgctctacgttctccaacaatgtctcttcctaatctgtgggagtttcctggtggaaagcttgaagaaggggagaatgctcgggaagcacttgtaagagaaattgaagaggaacttgattgtaaaattgttacgggcgatgtgatagctgatattcatcatgaatatgagaaggtcatcgtcaatttaatttcaataaaagcgaggattgtatcagggaagccggtagcaaaagagcatgcggaattcagatgggtgcctattcgtgagctagaatcactagagtgggcacccgctgatcttccgaccgtatctgctttaattcgttaaatccacatacaagttttctgggacaggctgatggagcttccatttgacattcattggcttgtctccgtggcttgatacgtaatccgcttctcctaaataaataaatggtaaagtgatgttgtgcatttcagtgaatttcctcacaaataaatgaatatggtatcctttttccttatggtgaataaagttttgccctacgcttgatatatgtgaggtttggttttgactttgccagtgaaaatggctaggatcaataaaataatctttatatagcaaatgatcttctactttttctgacttattcaaattgataaagattaaatagtgatttttaactctacgtacaccctctcgccaagtcccttcctgatcagttgactgaaaaagataaatgagctcatttcttgtataggtctgatacaatgttagcttaatctcttttgaagcaagggcttctatattgttcatacgtctaaattcaatcagtccatagtggacgcgctccttaatatacggtccgaataatggatcggttaaaatctcgcttacttctggatctaacttgaatgtatcaccttgtaatgtaccaaagcgccaattctgtttttgatctgatttcgttaaacgctccattgctcgctgaatgaggtcatcatgtgtatctgttgtgatttgaatatgaaactgtttttctaacgattcttttacatcttctattgtgatgatatttttgtgaaaaccgctctgtaaaattaaccattcataaggccatttaataggtaattgctgttctaatcttgctactatccctacaaccaaggggttattgagaatcccttcatctgtaacattcaaatcgtccattttctttttggtctgtacccacgatttgtatttctttataaaaaaggtaagcccaggtgcctgttcagagtatagaaaatcaattaattctggagagcgccctagctcttgtttaaattgcttgtataacgttttcagcatggcatctgaatttagtttaatgtgatcgatcttatttaaaatttctttcttcgttatggctgaaaggtcaacataagatcctccaggtaaatctgaaaactcatgcgtcacggccactcggagggaatctttatcaaaagatttttggcttgtttgtccagatagtgcgagtggaataacgaatgacttttgatagtttccgataaaatccagtatcgttacaaactctttgtcgtcagtttttctaagtccccgtcctaattgctgaatgaaaatcgttggtgattccgttggtctaaggaacaatagtagattgagctttgggatatctattccttcgttgaaaatatctactgtaaatataagttctaaactgtggtgcgggtcctctaattgacgaatgacctcttgtctttttgcaggagaatcatttcctgttaaataagttgtataaaaacccaatttattaaattcatcactcatgtatattgcgtgttcgacgtttgtacagaaacctaagccaaccattttctcgccgtggaatccatacatgttgatcatcttgatgatatattctactcgtttatgcgtttttaaatgattgactagcgatttctcttcgtacagtccgtttttcacttttactttttcgtaatctacagtatgatctgaaattccaaaatagtgaaatggcgcaagtagctctgcctttagggcatcgcggagtctgagttcataaacaacattatgatcacaaatctgaagcacatctttaccgtcaagacgctctggtgttgcagttaaacctaataaaaactttggtgtaaagtagtttaatacagcttgataggtagatgcttctgcatgatggaattcatcaatcacaatgtagtcaaactcatctgttgaaaaagattccaaagtatcttttttatgtaacgtttgtatagtgctaaataaaaaacgcttatctctttcttttttcgtgccagtcaataagccaaaatcttcatgattatttgtgactttcttgaatgtttcgattgcttttgaaagtaactcttcccggtgggcaagaaaaagatatttatttggtttaaattgctcaaaatcaaatgctgctaaaaatgtttttccggttccagtggcggcgatgatgactgcttttgtctccccttcgtttcttgtttttttaaggtttcgtaatgcttccttttgcatggcattcggggacattttcgttttgtaaagagagttttgagcagcaaaggaagcacttaccttttggcttccagcttggaattcctcataggcttgtaaaaattgttcgtcaacaggctgtgtcttttcattccaaacagtgtcaaacaaatcttttgtttgttgataaacggggagatatctggtttcaggtagtctcacatttaactcatacccagtcgtaagggcagcttgtgatagatttgaagatcctacaatgacactatgctgtccagaacagcgttcaaataagtatgctttcgtatggaaagattttttatattcatttacaattctcaactcaacattttcaaattgaagaagatgtcttaacgccttcggttctgtaatacccatataggtagatgtaatgatgcgtacagggacatgtcttttagcaagctcctgaagcggagggatcaaaagctgaacaccagaccaccttgtgaaactaaccataaagtctacccgatccgccgttaacatttcgtgttttattgctttgaaaaagttctcatgagtttgatgatttcctagcagtttcagacgatgtagagaaaattcctctgaaataggaagttccatttcatttaaactataaagcactgtggaaagtggcaatgaaaaattcgtatgttttccaagctgagaggcgaccttctcgctcagctgaatcgcttgttcatattgatcttgatccacaagtgtttgaaatgtctcgctcagttgttttgccgtatgtaaagtcaaaacttctgcatattcttttgggctgaccggttgaatgcgatgtgatgttggataaagtttttgttgttgctgaatttcctcatggaagcctctatgatttctcatcataatctccttttttatatcaataattccattttatcactacttttaccaataggtaatactgaaaaagaagagaataaagtcctatttattaagcgcttaaaaaataacgctgaggtagtttggtttggtataaagacgtcatcgccacaaacggagaaagtctgtaagcgcaatgttccggagaaagccggcaaaattgacattcagcaaagagaggaggacaataaaagcagaaaggcgggattcatatgtttaaaaaaattcttgcagcagtagacggttcagacatgagcagcaaagctttggacgcagcgatccatctggcgaaagaacagcaggctgaactcaccattctttatgcgggacgtgaagccgttgtctccacatcagccttaacagggattgtctatgttccggaaaacttcattgaagacatcaaacatgaagtcgagcaaaaaggagcggccattctggaaaatgccaagcagaaagcggctgaaagcggggtaaacgcggaaagcctgtacgtccaaggcgaacctgcgcatcaaattttaaacatagcgaaagaacagcatttcaatctgattgtcgtcggaagccgcggaatcagcggatttaaagaaatgatgctcggaagcgtgagccataaggtctcacaattgtctccttgtcctgtactgatcgttcattaaacagaagaccctgctgatgcggggctttttttaatgagaaaagaccgccgtctttcgaaaaataggatgaaatcttcctctgaatcaagtaaaatggctgttagtatttgtctgaataaacagtcaatgatatgggggaagcaaatcaatgcaagctgaacaaacatcaaatgccgtcatcaaaatggtcatttccatggtcattttcggatcaatcggctttttctcggaacatacgaatgttccttcaattgaactggtctttgtgagatgtctgtgcgcctctttgtttctgggcgtttgctggtttggttccggacggcaccgcaccgaacaatggaaccggcgcgaggtgttgcagacattggcctgcggattttttctcgtgctgaactgggtgtttttatttaaatcgtttgaggagacatcagtgacgatagccatttccgtttatcatctggctccggttctcgtccttcttctagggagccttatataccgggagaaactgcatattgtgtccgtcacttccatcgtgatttgttttctgggcaccgccctgatttccggcatcaacggaaatacgtcattttctcagctgatgggatcgggtattatttgggccgtgctggccgcccttttttacgcctttacgacactggccgggaaaggtatcaacagtctcagcccatatgcggtcacctgtttgcagaccgggttgggcgttatcattcttctcccgttcgtccgtttcggcgctttttctgatttgtcgcatgtgaactggatcatgattgtgtcaaccggtatcattcatacgggaattgtgtatttgctcttttttgacagcttgcggtttttatccacccggtttatatcaatcatcgtatttcttgatccggcggtggcgattgtgcttgacaccgtatttacggggtttcgccccgacctttatcaatctttggggattgtgttgatttttgcgggaatggcactgtccctgattcgaaagcaaaaagccgtgccggcggaaactcaggcagacagcacccgtatataggcggccgtatcggctgctttttttgttttggggcttttcagccataacgaaaaagcagacaaacagatcatggaaaaagaggatagtaattgtataatacttcatgtgtttgcaatttaagagattaaaggagtgaagggcatgaaaaagaagacgcgtcatctcgctttcttggctgcactcggctttgcgctttgtctggccatcgtatgttccgcatccaagcaggcagaagcggcagcggcttatccggatgtgatgcagggacttaccggattcgctggcaatgcgaaggatcataacggaaaagcaaaatccgccgtatcgggaggccagggcggccccgtcgtctacgtcagcaatctcaatgatctgaaaaacaatgcgggcggaacggaccgcaaaaccatcgtcatcacaagtgatatttcttccccggggaaagccgttgtgacagtcggcgccaataaaaccatcgtcggctcttataccagccacaggctgaccaacatctatctgaccaccggctccggatcaaacaatgtgattttcaaaaatctcattatcagccataatgccgccattacaggcaacaacgacattccgatgtacatagcgaacgggcagaattactggattgaccacgtgtggtttgaaggacacagctacaatccgaacagccacagcgatttgggaaagcttctgtatgtcggcgccaaagcggattttgtgacgctgtctaactctaaattcacagaccatctgtacggcctgattctcggttatccgaatgatgataacgaaggacgcaattatatcggctatccgcatatgacgatcaccaacaactattttaataacgtctatgtgcgttcaccgggcctgatgagatacggctattttcacgcgaaaaacaactatgtgaccaatttcaatttaggattcaccattcatacaaacgcgactgtcttctcagaagccaactatttcggtaacggaaatgaaaaaggcggaatgatagacgactacgggaccgcccaattcaccgacaccggttcattcccgtcgctcaaagccccgaaatcaccgcgcaccggctggaatccgagatcaaattacagctacggcacgctttcagcccaggacgccaaaaacttcgcccaatcctacgcgggagcgcaaaatacaaatctccgctatccataatacaaaaaaccgccggcagccggcggtttttttatatgaataaaaggttcaaaattcctataatccttaaaataaccttaaatacctaggaaaatattgataaacaatttcaataatattactattgttaagcctatattacaaaagaaggaggagaacctatgaaaataggaaaaaagaacaagtggaaaaaatggctggccggcactcttgcggcaacgcttatgatttccattgcgcctgccgatgtatttgcggcagaaacgcgtgaaaaacaagatcaagcgaaaaccgccgccattccggcagcagacccggaaaaagatcttccggcggaaaaagcatccgagcagatgccgtttgatcaaaaagatatcaatcaagacggtgagatcacgtctgaaagaactgagaattcaaaactttattatgagggcgagggtgtatacaaacaggaaatctacacagaccccattcatacgaaagaaaccgccaatgcggactgggaagacatttctcctgaattgaaaaccggctcaaaggatgtcgggacggaaaatacagtgctgaactccgattttctgaagcaaatgaaaaacggattatacgctacatttgaacacggtgatcataagctcacatactcattaaccggcgcaaaaggccccgatcaggctgcaatcactccgacagatgcctcagcaaaagtgaaggaagacagcaacgagcttacgtatcagcaagtgtttcctgctattgatttacaaacctacacatttaacgaaaacataaaagaagaccttgtgcttcacaaatatgaaggctacaattccttcacctttcaaatcaaaaccgaccttcaggctaaagaacaggaagacggctcgatcgcgttttctgatgacaaagacaatgtcgtctacaccgtgccgaagccttttatgaccgactcagatctcgacgagaagtcaggtgaggtcagcaggtcagaagatgtcagcttcaagcttgaaaaaaacagcgaaggctacttgctgcatgtaacggccgatgaaaaatggctgaaagatcccaagcgggtttatccggtatctattgatccttccacatcagtatccgtgtcatccgatacctttgtcatgagtgcgtacccgacgacaaactactctgccgcgtcgcagaaatgggaggccggattgaaagcgtacgtgctgaaaacaggttattatgacggcacaaccggaacgaactacgcatttatgaagtttgataatctaaagccgatcaaaaacatgacggtgacaaaagcgacgcttaaagcatacacagcccactcctattacggatcaaaggcgacggggctttggctcgacaccgtaaacagcaattacgacaatgccaagatcacgtggaaaaacaagccgggctccaaaaacatcggcaaagccgaggtctataaaggccaatgggcaagcttcgatgtcacatccgcagtcaagtcgtggaacagcggcggcgccaattacggctttaagcttcacacaaacggcaacggaaaagaatattggaagaagctgatgtcatcagcaaactctgctaaaaaaccatacattgaagtgacatacacgattccgaaggcggacacgccgtctgtcaaagcgtatcataacggagattcgacaggacttttcaatatcagctggaaaaaagctgaaggcgccaaaagctataaagtgtggctttataacgggaaagaatatcaagccatttctgtcggcaatgcaacctcttggagcacaaaaggaaaaaacatctggccgacaaaagcagaaatcgactccggcaaatataagctgcatacagacggaaaaggcggaagtgaattagcgcttaatccttcgccggtctataaaaactccggcggcagctatccggcaagtaaaaattactgggtcgcggtcagcgcggtgtttgaccagggagaaggcgccatgtctgcggccgccaagcccgtcattccgaatattggcagagttcagaaaccaagcacgaaaggctttaataacaacaacgccacaggctggtttgatctttcctggaaagccgtatcaggcgcagccgggtataaaatgcaagtctttaacggcaaaagctttgaaacgcttgacctcggaaataaaacatcctggtccacaaaaaatcaaaacatctggccgacaaaggcggaaatcagcgccggaaaatatgcgcttcacctgaaagacaaaaaaggcgcggaattgccgatcaacccgggccccgtttataaaaatgccggcggagacgcaaaccggaaaacatacggatttaaagtaatcgcctataacaaagacggagaagcgatcgcctcaccggaagctagtccggcgctgcctgatatcgcaaagccgaaaaatctgacaggctacgtctatacgaacacgaaatcgagccaaacgggttatgtcaatctcatatgggataaagtcaaaaacgccaaaggctacaaaatcaacatctacaacggaaaagactatcaatcattcgatgtcggggataccgatcattggacgacccaaaacaaacacatctggccgtcagccgatgaagtgaaagcgggaaaattccagcttcacacggacggaaagggcggcgaactggcgcttgacccttcacctgtttacgaaaacgcaaacggcaattacaaagggaagaagaactattcctttacgctgaccgcctatgacgcaaatggtgacagtataccgacggcaccttttaaccctgttttccatgaaggtgcggaattcctcggaacggaagaattctggtctattatcgacattccggacggacagctgaacggcgcgacgggaaatgtcatcgtcaatgaagaagatatgtcaatcgacggacgcgggccggggctcggactctcccggacctttaacagccttgacagctctgaccatatgttcggccaaggctggtatgccgatgcggaaatgtcgattctttctgaagacggcagagccgtttatattgatgaggacgcgacaacacatgtcttcacgaaaaaatctgacggcacgtatcagccgccgacgggtgtttatctcgaactgacagaaacaagcgaccaatttgtattaaaaacaaaggatcagacgaacgcttatttcagcaaaaaaggcggcaagcttcaaaaagtcgttgacggacacaacaacacaaccgtatacgaatataacgacagcaatcagctgaccgccataacagacgcatcagggcgcaagctgacatttacctatgatgaaaacggccatgtcacatctcttacagggccgaaaaacaaaaagatttcgtattcatatgacaaagaccttctcaaaaaggtgacggatactgacggcagcgtcacaagctacgactatgatgccgaagggcgcctcgtcaagcagtattccgcaaacagcacggatgacaaaccgctgttcactgaataccaatacagcgggcaccgcctggccaaagccgttaatgcgaaaaaagaaacgtatgattacagctatgacgccggcaaaaaaacgctgctcatgacgcagccgaacggccgcaaagtgcagtacggctataacgaggcgggcaacccgattcagatgatcgatgatgccgaagggctgaaaatcacgaccaacactgtatacgaaggcaacaacgtcattcaggacaccgatccgaacgacgcggatgcgggcaaagcgacagaaagctatcaatatgataaagacggcaacgtcacagccgtaaaagacaactacggcaccgaaacgtatcagtacaacaaaaacaatgacgtaacgaaaatgaaggataccgaggggaacgtcactgatattgcgtacgacggacttgatgctgtttctgagacggatcaaagcggaaaatcctcatccgccgccgtgtatgacaagtatggaaatctcattcaatcaagcaaagagctggcagcttcggcaagcctgctgaaagacggcagctttgaagcaacaaagctgggctggaatctcaccgctacgagagacagcggaagcatcgcgtctgtaaaagcaagaagcggcgcgctgtccggacaaaaagcactggagatcacctcacaatccgcttcagccggaacagagcacggccatgcgtccgcaacgcaggaagtgcagcttgagccgaatacgacgtatacactcagcggccagatcaaaacggatctgacaaaggcgagagcgtatttcaacattgatctgcgtgacaaagaccaaaaacgcattcaatggattcacaatgaatcaggcgcattagccggaaagaatgactggacgaaacggcagattacctttacaacaccggccaatgcaggaaaagccatcgtctatatggaagtggatcataaagacaaggacggcaaaggaaaagcgtggtttgatcaggttcagctggaaaaaggcgaagtctcttcaagctataacccggttcaaaacagcagtttcacggctaaagcagatggctggagcacaagcggagccgccgctgaccttgatgaaggcttcgatgatgacagctcattaaaagcgtcccgcacaaatgcatcacaagccaatgcggccgcaaaacaaaccgtcacattaggccaaagcgcggacgataagccggtatatatcacgctgacagggatgtccaaggcagacggcgtaaaattaacgaacgacaatgattacgcgcttcaggccggcgtcacctatgcggacggcacgacgggcgtctacaccgccaaattcccgcaggggacacaggaatggaaccgggcggcggcagtcattccgaaaacaaagccgatcaataaaatcgaaatcagcattctgttccaaaaaagcgccacaggaacggcgtggtttgatgacatccgattaatcgaaggaagcatcctgacgaaaaacacctatgacgaaaaaggaaactacgtcacaaaagaagaagacgaactaggttatgcaagcactgcttcatatgacgagactggcaagaaaatgtctgaaaccgacgcgaaaggcgaaacaaccgcctacgaatacgatcaggccgaccagctgacaaagctgaccctgtcaaacggcacatccatccttcacagctatgacaaggaaggaaatgagctgacaaaaacgattcgggccggcgcaaaccagacctatcaatatgaatatgacgtcatgggcaagctcgtcaaaacaaccgacccgctcggcaatgtactgaagagtgaatatgacgccaacagcaacctgacgaaaaccgtttccgccaacggcaatgaagtgtcgctgacctatgacggcaccgaccgggttaagtcaaaagcgtataacggcactgaaaaatacaactttacctatgacaaaaacggcaatgaaacgtcggtcacaaacaaagaacaaaatacaacgaaaaaacgcacctttgacaacaaaaaccgcctgaccgaattaaccgaccgcggcggcagccaaagctggacgtatccggctgattcagataagctgaaaactttctcatggagccacggcggccaaaaaggaacaaacagctttacgtacaacaaacttgatcaaatgattgaaatgaaagacggcacttcagcctatacatttgattatgatgaaaacggcaatgtccagacattcatcagcggaaatgaagtcggcacgagcttctcatatgatgagcggaatcttgtcagctctcttcatatcggagcgaaaaacggcggcagcatcttccgggaaagctatgaatacgacgccaacggcaaccgcacggtcatcgacagctcagccggcggaaaggtgcagtacgaatacggcaagctcaaccagctcgtcaaagaaactcatgaagacggcaccgtcattcaatatacgtacgacggcttcggcaaccggacaaacgtcaccaccacaaaggacggcgcaagcaaatcagtcaacgcatcattcaatatcatgaaccagctgacgaaggtgaatgacgaagacctgtcctatgataaaaacggcaaccgcatatctgacggcaaatacacatatacgtgggacgcggaagacaacctgaccgccgtcacgaaaaaaggcgaagacaagccgttcgcaacatacaaatacgatgaaaaaggaaacagaatccaaaaaaccgtcaacggaaacgttacgaactacttctatgacggagacagcttgaacgttctgtatgaaacagacgccgacaacaacgtcacaaaatcatatacgtacggtgacagcggccagctgttatcctatacagagaacggcaagaaatatttctatcactacaacgcacacggcgacgtcatcgccatctcagacagcaccggaaaaaccgttgccaaatatcagtacgatgcgtggggaaatccgacaaaaaccgaagcaagcgacgaagtaaaagacaaccgctaccgctacgcaggctaccaatacgacgaagaaaccggcctgtactatctcatggcccgctactacgaaccaagaaacggtgtattcttatcactagacccagacccgggcagcgatggggattctttagatcagaatggatatgcatacggaaacaacaacccggtgatgaatgttgatccagatgggcattgggtgtggctagccattaacgccggctttgcggcttatgacggatataaggcatataaatcaggtaaaggatggagaggtgcagcctgggcagcggcttcgaactttggtcctgggaagttatttaagggtgctaatcggatttataaagctgctaaaacatataaactatctagaaaaagtgtacgggctagaagggcctactcaagttatagggatataactggaaaaacttctaggttcaaaaattattctactaatgtaaaaagaagaacttttgaaaaaaatttaagaagacaaggatggagaaaatcagttcatcatgggggtgttatcactatgacgaaaaatgggaataagtattccctaaggaaacatgctaagtcaagtccctatccaaccgcggaatatacacctaaaggtagaaaaaaattcacacacaaaatcagaatgcgacattaaaggggaaataagatggatcactattttattgatcatcctaaggagttaaaagtctatcaatccataattaattccttatgtcacgtagatcaaacattgcctaaacaagtttttaagcaaaggaaaaattattatttattcgaggaattccattgggtattatctgaagaaagttggggaatgtttaagagtttggctaatgaacatcatgatgagtttatattaatggctgttatagacagttctgaacatataaaccaattctacgaagaatttgagtattttaactggataaagatccctttgcatataactgcagatgagtatctgtcactcttaactgattatccaaagcacagtaaaagtgactgtataatgaatattgcatctcgtgttgtttgggcttcaccgactttaaagtgggcgatttatggtgagagagaacttgaaatctgtattctaggtattgatcatcagagtgaaggaaaagaactagcaacttggagatcgttagatggcgttgtcttagattggatatcagttgtattcccaaatcagacggttccagttgaatttgaaaaaacacttacggcacattacaaataagtatatttttaatacctactaccgatatcatctgattgttctaaacgggatttcaaataatctccagatagtatttttgcattcaacagatatttaatgacaaatatgcagagtaatatatttttggggcttgtttgaataatctatgtttatcatcaagacacttctatcaatgggtttgttagtgttagttaggagaaggagaagacaatgcacaaacaaattgaacaatagagtagattatattgacgagggatgtaatattttaaaggtcgattatcagttctttaaaaaagacctgttttaaggttcaggttgttaaaaatgcagcatctgtttattttagtgcagatattggtgatatgagattagaaaaaatagattcggaagaatacaattggcaagtatttgagatgagttaccacccggaaggaatcggtaatctatcaaatgctgtaattccggagtatcaatcaaatgctaattttctcattgacatgaacagaatgctgattgctgtagaagctgaaacagttcgctttgacgaccaatcattttatgcgtatcatccgaaatcataaataaacaaataagagaggttcccagcctctcttttcttacataacgaaatcgttcgcggaggcaaacatgaacactcctttaaatttacaaaaagaatcattgagggctatagggaatctggatgtgattaatccgcttaaatacaattcgatttattcatgtgatctagtgagtaaagatactttttctcaaattaatgaatgacttagagttcgaaacagctctaatagaagtaatggcattcccttcttttattgaagaatggaagaagaaggttgaaaagaaaatgataaatatgaatactgtatcgaaaaagttcattcatattgaatgtgtcctaaccaaagaagaattgatggcagattacttattagatgaattatattttttagcatcgatcaatgattttgttgttataatagcaaaccctgccaaaaataagtcctgcatgaacctgaacactcaaaaggttgatgtaactactgaaagtaatgaaaaaatcatttggtttgaatacgatgcagcagatttatatatcattgattaatttaatataaatttcaggttcctattcaacggagtgttgctgatgttaaaacttaccgcggagcgtgttgggtcatatgaaagggaaaatatcatttatttcaatgcgggtcgggatgatcaagtatttattgtgtcggtgcacgatcacaaagtaatattggaggttatgaaaggcagctctcttttaatcaaaaaagagttacacggattttctgaagatgcccatttctatctgattgattcgtatgatgacactatcgtgatcgtttacctggagaatcatacgtgtcaattggctgcatactgcgtaaacagtaataaaatcaatccgatttgttcttttctattaagcgccaatgtatttcatctgggtgaggatggattattatggatcggattaacggacgagggtatgtatgatgagagaaatcctcaaggaaaagcgatatttgcttttcatgcagaagacagaacgttttattttgaagacgattttaaagaaatgatgcacgaatgctatgccgtacaatcgatcaaatctgatttgtatgtatgtttcgagggagaggattgctgtgtcatcgggcattatcagattggacgggacagaattcgtactgttgcagaatatgtgctggacggcgatcaatactcctattgtgatcagctatccgtttcgaaaaaaagggtgctgctgattcagagtcacgatgataccctatttgcatttcatgaagagcacaaagagactgacgtcatgatacacggtattgatagaaaaggagaaacaacgtacagagccgtacaggatcgcatgtttatctttagtgataacgatttatatctggtaaagtattgatcaatcctatgcagatggctttttacagccatctgcatatcattttacggagtgaacgatcgatataaataggataccatccaagactcaaggggcaatgacatgaaaataaaaatgaataagatagtcgaagaatcagtaaaaggatgtttttgtcattttgataactgcgggcgtctgtatctcggacggcatcagaatggcgggctttcgtttacgatcatcgacaaatcgggcgatacgcgagtgattcatatcgatgaacaaatcccgtatgaggatattatgctgttccaacagagttcggctgactggtatgtgttgattttctttgaatcgcatgagtataaagtgaaagtattttcagcagaaggaacagaacaaagtgcattttctctcccttcaggggtttcatgcagtcttttggatgaaaaacaaaacctgtggatcggtttaagtgatgaaggtatttatagtgatgaaaatcctgaagggcacagtgtgctgtgcttcactttagacgggcagctaaagaaaacccacattgatcagcagctttcagaaatatatgcgcccgcggtagatgactgttatgcacttgcagaaaaagacggactaatctacatgctgtattacgcttatacagtcattgctgcgtttgaagaaaccgacgtgaaacgagtgtggattatttctgataaagcatattccggggtttacgaccagctagcgatttcagataacgggttttgggtatgcaaagatgatcattcactgtctctcattccggccgatgtcagtctgccgatgcaagagataacgtgctgtgatgcggatggcgatgagctttccgggcatcagctgaagctgactggcgatgccatttacgcggtctcgaattcagggatttataagcgggatatcagtaatgggaaagcggctaaatgagatgttaagatccaacagatattctttaaataatgacgtcatcagaagcttgaaattacacaaaaaagaattagaggggccgctgccttcagatgcagggagattcgaagaagactttgagggtgctgcctgcgctggggatttttatgaatacttcgcacttgtctgcggcagcttagattttgttttggcgaataaacaaatgcctgcacggcagcgtaaagccttatataaatccttttttgagctgtatccgcaatatgcgcagctgaaaaacgctttgatggattatccggagctcagccaggaaatcgggcggcacgaacgggccaggaggctgttagtcagcattttaaacaagaaatgaaaggcaggattttgacgtgaaagaacccacaagagcagaatgtctgaaaaaggctggtctgatcctgaacggtcaagcggcgagggaagaagtgtcggattgggcgtctgagtatgtgagtgcaggtgatccggcggatgaggacgaaaccgtttgggagatgctcgtatatttgagcgggtttgatctgaaagattcgcctgatgcgtatctgcatacgatagaagaattaagagattgggtgcaggaatataaagaagttcatggggatttgtaagaaaaaaattcatttgagtcagacatgtcaattcagctgaaaaaaaggaggcgcaaaatggaatggcacaaacatgagaaagcagttctgccggggccaggttcgccgggttgttttgaattgacggagtttacgttctataccgggtataacgagtattatgataaaatcccggtgtttgagctgaagctgactgacggacagtatgatgccgtgctgcggtttgaggatgtgaggtctgcccggctggatgatcttgaaagcatcaccgacatccatctggatatcagcccagtcgacggcggctgggaatcgatccgctactatgtcgatgacggggaaggaagtatgagcttttattgcgccaaatgggtcgtgctcgacatgaagaaaaagcagtcccccgaacggcccggcaaaacgtcagggtaaagcggcggcatttcgcgtataatgaggggagccggacagagaaggagtttagtcatgaatgagtttaatgaatatgcgatcagccccgagatccgacgggcgctgaatggcttgcaatacaccgagccgactgaagtgcagcggcgcgtcatccccgccgcgctgcaaaaaaaagacctcgtcgtcaaatcgcagacgggcagcggcaaaaccgcggctttcggcattccgatctgcgagcttgcggagtgggaggaaaacaaaccgcaggccctgattttaacgccgacccgcgagcttgcggcgcagattaaagaagatatcacgaatatcggccgtttcaaacggataaaagccacggcggttttcggaaaagcttcttttgacaaacagaaaaccgaactgaagcaaaaaagccacgtcgttgccggaacgccgggacgtgtgcttgatcacatagaaaaagggacgctgccgcttgaacggctggcgtatgtggtgattgacgaagcggatgaaatgctgaatatgggatttattgaacaggtggaagccatcattcagcatctgccgaaaaacagagtcaccatgttgttttcagcgacgctgccggatgacgtcgagaagctgagccgcacatatatgaaagaccctgaattgattgaagtaaaagcggaaggcctgacgacaaaagacattgagcattttgtcaccagaacagaagaagaggataaatcatctttgctgcgtgatgtcctgatcaccgaaaacccggacagctgcatcatattctgccggacaaaagaaagggtcatccagttaaccgatgagctggacaggctgggctacccttgtgataaaattcacggcggcatggtgcaggaagaccgctttgacgtcatgaatgaattcaagcgcggcgagttccgctatctcattgcgaccgacgttgccgccagaggaattgatatcgaaaacatcagcctcgtcatcaattatgatattccgcttgaaaaagaaagctatgtgcaccgcacaggcagaacgggccgcgccggacaccgcggacgggccgttacgtttgtgacgccggctgaatcgcggtttctgaatgacattgagacatatatcggtttccgcatccaaaagcgggaggcgccgtccgagaaagaaacagcggaacggaaagcggcttttgcggaaaaattgaacgcccgccccgatgtcaaaacagacaaaagcgaacagttaaacaaagacatcatgaaactgtactttaacggcgggaaaaagaagaaactcagagcggtcgattttgtcgggacgatcgcgaaaatcgacggcgtttcagccgatgatatcgggattatcacgattctggacaacgcaacatacgtcgaaattctgaacggaaaaggcccgcacgttcttgacatcatgaaaaatacgacggtcaaaggcaaaaaactgaaagtccataaagccaagaaataaaatagaaagcctgccgcgtgcaggctttttttacgccgtttcctcaggcacaaacgcaaggatggcaatgccgatcacaaataacaaaatcaggctgaacacggcggctgacgaatttccggtcagctgggcggtgacggcaatcaaaagcgggccgataatcgaagcgaacttgccgaagatattataaaatccgaaaaactcattggcgttctgtttggggacaagctttgcaaagtaagagcggctcagcgcctgaatacctccttgggaagtggcgacaagcatagccaaaacccagaaatcaaaagcggaatccataaaataagcatacgtgcagacaatcatatacacgccgattccggcataaagcattgtttttcctttaaaccgttcggccagccgctcgtacaaaatcgaaaaaggggcggcgacgacctgtgtgacaaataaaacaatcagcagatttgccgcgctgatgccgaggtcagccccgtatgacgtggacattgtaatgatggtgccgaccccgtcgatatagaagaaataggcgagcagaaacaaaaacagcgcccggtgcttcctgatctgcttcagcgtgccggccagccgtataaaactgctgatcacaagccgcggctccctctcgatataatagcgctggcggacgcggagaaggagcggaatcgaaaacagtccccaccatgccgccgtaattaaaaaggcaatgcggcccgcagtctgggcggacagcggaatcacctccgcttgtgctgacagaatcacggcaatgctcaggagaaaagggattgtactgccgatatagcccagcccaaaccccctggcggacaccatattcatccgctcctttgcggccacatcaacgagaaacgcatcataaaacacattagatccggcaaagccgatcgtggaaatcgtataacaaattaataacagcatccaagattcgccgggaatcaaagccagcgcggcggtgcccgccacaccgatcagaaaaaagaaggcaaaaaaccgtttcttgcatcctttgtagtcggcaatcgttcctaagacggggctgagcatcgccaaaataaaagtcgcggcggcaatcgtatagcccaaataagcggtggaatcagctgcgctgacgccgttttccgccgccgccgctttaaaaaacaaggggaacaccgccgtcataataatgaccgaataagctgaattggcccaatcatacagcatccagctgctttcttctttcgaaaaccgtttcatcacacacgctccttcccaaaaaccggttctctgcattatatgcgcctctgcctcatcgttggacaatgatttctgaacggcgttttctgattgacctggagatattgacctggtacaaaaaggatgtacaatcaaggtgtagcaggtaaatggtcaggcgggagggagacggaattgaagattgcgaaagtcaataataataatgtcgtcagtgtgctcaaagaaggcaatcaggaattggtcatcatgggccggggcattgcttttcaaaagaaaacgggagatccggcagatgaagcccgcattgagaaagtgctcaccctcgataacaaagatgtatccgaagttcaaaacccttttgtatgatattccgatcgagtgtatgaaagtatccgaggagattatcagctatgcgaaattacagcttggcaaaaagctcaacgacagcatctatgtgtcgctgaccgaccatattactttgccattcagcgcaataagaaagggctggatatcaaaacgccttgctgtgggaaacgaagcggctctacaaagacgaatttgcaatcggaaaagaatcgctgatcatggtaaaaaacaagactggcgtgtctctgccggaggatgaagcaggttttattgcgctgcatattgtaaatgccgagctgaatgaggagatgcccaatatcatcagcattacaaaagtcatgcaagagattttgagtatcgtaaaataccattttaagattgaattcaacgaagaatcgcttcactattatcggtttgtcacccacttaaagtttttcgcgcagcgtctttttaacggcacacatcgactttttgctggagaaaaataccgtcgggcgtatgaatgcacgaagaaaatccaaacttgcattgagagggcgtatgagcacaagctcaccagtgacgagctgctgtatttaacgattcacatagaaagggtagtcaaacaagcataatgaaagcgttggcattattgttcttggattcattttttcttacattcacatatgatcttgttaggattgttgctgataagcatgcaaaacctaaattacaatgagcgcggatcatttctgtttgtgctgatggtaatttaggtttttttaagattcgttattatcattattctgaccgatgttcccttttaacagaatcatgtatgatcgataaagaaatcgctctcaaagaaaggggaatgccgacatgttttatcgtatgaaacgagtgctgctcattcttgtcactggattgtttttgagtttgtgtgcgatcacttctgctgcatcagctcaaacaggcggatcgttttttgaaccttttaacagctataactccggtttctggcaaaaagcaaatggttactccaatggagatatgttcaactgcacttggcgtgcaaataatgtatccgtgacgtcatcaggtgaaatgcgtttggcgctgacaagcccgtcttataacaagtttgactgcggggagaaccgctccgctcaaacctatggctatggactttatgaagtcagaatgaaaccggctaaaaacacggggatcgtttcatcgttcttcacttatacaggtccaacggatggtaccccttgggatgagattgatatcgaatttttaggaaaagacacgacaaaggttcaatttaattattatacaaatggcgcgggaaaccatgagaaggttgcggatctcggatttgacgcggccaatgcctatcatacgtatgcgttcgattggcagccgaactctataaaatggtatgtcgatgggcaattaaaacatactgcgacaagccaaatcccgacaacaccgggaaagatcatgatgaacttgtggaatgggataggtgtcgatgactggctcggttcctacaatggtgtaaatccgctatacgctcattatgactgggtgcgctatacaaaaaaataatgtacagaaaaggatttccgccagcggaaatccttttttaattaaaacgaaataatcccaatcaaaagcgccgcaatcgtcatcacaatcgttgttcccacggcccatttaatagtgaatttttgatggtcgccaaagctgacgcctgccattccgaccaatagataggtggatggcacaagcgggctgagcagatgcaccggctgtcccagcaaggaggctcttccgatttcagcggcgtctattccgtaagcggaagcggcttcggcgatgatgggaagaacaccgaagtaaaaggcgtcattcgacatgaaaaaggtgaaaggcatgctggcaatcgccgtgatcaacggcagatgcggacccatggcatcagggatgagggaaacgagagaatgcgccatcgcatcgaccatttttgtgcctgagagaatgcctgtaaatatgcctgccgcaaacaccattgagacaacgtttaacgcattacccgcatgcgccgaaatccgtttctgctgctctttgacatttggatagttaatcatcaaggcgatggcgaacgcgatcataaaaagaacagggatgggaagcaggctggtgatcagcgcggccatcagagcgacagtcagcagcaggttaaaccactggagagcgggacgcttcagcggcgccgcctccggatcagaagacggcgcgtgttcaatcgaaatgatgccgagacgcttccgttctttttttccaaggagataagcaacggcgatcacccagagaacgccggcgatcatagcgggaatcagcggcgtaaaaacttctgacgtgtccaatttcaaggaagccaaaaccctcgccgtcggtccgccccacggaataatattcatgacgcccgaaccgagcatcgcaatccccgccagcaccaaacggttcatgccgagccgtttgtaaaggggcagcattgccgcaatcgtaatcatatacgttgttgtcccatctccgtccagcgaaatggtcatcgtcagaaccgctgtgcctacggcgatttttaacgggtctcctttgacaaacgataagattttggcaatgagaggatcaaacaggcctgagtcgatcataatgccgaaatacaggatggcgaataacagcataatcccggtaggagcgaggtctgtaacaccctgaatcatcatcccgccgagatctttgccaaatccgctgatcagggcaaacacaacaggaacgacaatcaaagcaataagtgcggaaagccggttagacataataaggtacataaaaacaatcatcatcacaaaaccgagtatggcaagcatgatatgacctcccctgttcaacagctgttttggtaagcgctttcacattttgtttctgtgaaaatggcttatttcaaaatgtgtatgaccgcatatgtaaatacagacctaaaatcctaatgagcggatcagcagtttatttaaagaacgccgcgggtaaatgtgctgtagaatgtttcgttttaaaagggggaactgacatgagtgatgatcaaaacaaacgagtaaatgaacactcaaaggacgaacagctggagcagtaccgatctgataacagcggcaaaaaaatgacgaccaatcaggggcttcgcgtgtctgaggatgagcattccttaaaagcgggcgtccgcggccccacgctgatggaggattttcattttcgtgaaaaaatgacgcactttgaccacgagcggattccggaacgggttgttcatgcacgcgggtacggcgttcatgggcattttcaggtgtacgaaccgatgacggaatatacacgggcgaaatttttgcaggacccgtccgtcaaaacacctgttttcgtccgtttctcaacagtggcgggctccaaggggtcagctgacaccgtccgtgacgccaggggatttgcgacgaagttttatactgaagaagggaactatgacctcgtcggaaacaatattccggtgttcttcattcaggacgcgatcaaattcccggatctcgttcacgccataaaaccggaaccgcacaatgaaatgccgcaggctgcgacggctcatgatacgttctgggattttgtcgcaaacaatcctgaatccgcgcacatggtcatgtggacgatgtctgaccgcggcatccctcgaagctatcggatgatggagggcttcggcgtgcatacgttccgtttcgtcaacgagaaaggaaaagcgcgctttgttaaattccactggaaacccgtgctcggcgttcattccctcgtatgggatgaagcgcagaaaattgccgggaaagatcccgatttcaaccgccgcgacctatgggaaacgattgaaaacggcggcaaagtcgagtatgagctcggtgttcagatgattgacgaagaagatgaatttaaatttgatttcgatatccttgatccgacgaagctgtggccggaggagttggttcccgtcaagctgatcggaaaaatgaccctcgaccgcaatcaggacaatgtctttgcggaaacggaacaggtcgcctttcacccgggaaatgtcgtgccgggcattgatttcaccaatgatccgcttcttcaaggccggcttttctcttatacagatacacagctcatccgtcttggcgggccgaattttcacgagattccgatcaatcggccggtctgcccgttccataacaaccaatacgacggctaccaccggatgacgattaataagggccctgtcgcctatcataaaaattccctgcagaacaatgatccgtcgccggcctcagaagaagaaggcggatacgttcattaccaggaaaaagtagaaggcagaaaaatccgccagcgcagtgagagcttcaatgactatttttctcaggccaagatgttctggaacagcatgtctcccgccgagaaagaacatatcatctccgcgttctgttttgaagtcggaaaagtgaacagcaaggatgtgcagcagcaggtggttgatgtcttcagtcacgtcgacgccgggcttgccgagcgtgttgcgaaaggaatcggcgtgaacccgccgccgaaggaccgtgaatctgatgaaacgttcacttccccggccttaagccaggaaaacacggtgaagacggcagcgacaaggcaggttgcggttttaaccgaccacgggttttctgatgagaaagtcaaacaagtgcttgacgcatgcaaacaggcgggagtcagagccgatatcatcagtcctgtgcttggaaccgttaagggagaaaacggcacggagctcgaagcgtcagccacgttcctgacagcggattccgtcctgtacgacgctgttttcattccgggcggaaaacaaagcacagacagcctcaaagcccaaaaatcggccagagacttcgtcaacgaagctttcagccattacaaagcgatcggcgcctccggtgaaggaaaagaacttctcgccctcgccgccggaaccgaaagcggccccggtcttgttccggacggaaaccatgaacaatttctgaaagccgtggctgagcatcggcattgggacagaaacgtataagaatgaaaaagcgcctttgatgagaggggcgcttttttcttgtgaaagaatattgggagaaaacgaaaattgcttccgtacaaatccgtatcttccgctgtcctggacattcagacaacagttttagagagtcagggcatgcgctatttaaagcaggcgggttgatgaaataatagtttcaccctctttggtttacttccgccctgtgtttgtgtatcttaggggtagattttctggaggagcgattgatagtgaagccgtttaccgaaaaacaacttgaagaatattaccggcgtgacgaaaacatgatgattttggtgtttgcccaatggtgcgtcaatcatgaccttgatccgatggccatttacagcaaagcttaccccggacagcctttaaacgaagagctgcgaaaaacggctgaagagcttgtcgtgccgaaggaggaatcagaaccgattcctgatcaaaccgtcatcggcgttttggagatgttcggcaactccgatttggcggaagccgtttatgaagccattgcgcaaagaccttcacggtaaaagaggcgtggattatccatgtctctttttttcatggagaaaatgtgaaagaaggcccagaaacaatttgctgatctgcgctgtctatagagtgtaatccgttttcaaaaagggaacggtaatgaaaaggaggagttgtgatgaaaaaggcattcaaaatgatggcggccgtgctcttaaccgtgctgacagccgcgccgttcggaggtttcgcgccttcagccgaggccgcgcaaactgcaaagcccgtcgtcaaaagccagacgtataagcatgtaaagcagctgacgtaccccgaggtcacaaatacgggaaacgcatcttttgaaaagaaaatcaatcaggacttcaaacgctatattgaaaactcgtaccaagaatatgtaaaaaacaaaaaagacggtgaaaaacaaggctacaaagcggaataccaggcagatttcaaggtgaagtataatcaaggcggcaagctcagcattcagacggaaaactacagttacacaggcggcgcacacgggctgacagccgttcagacctttaattacgacctggccgcaaaaaaacgggtcacactcaatgatgtgctcaatacaaaaacgaaagccaacaaaacgagagactatctttacggctacatcaagaaacatgacgatctgtttgaccaggacgtcaaaaaacaagagatcatcctgaataacgaaagacctttcttctttacgaaaaacggcattgccgttgtgttggacaatatgatctcggaccatacgcggcaggaatccgggacgttttcgtgcctgcatccgtctatcaataaaaaaaagcgatatcactctaaaacggagcggtatcgctttttttattttaccagacaaacaatccgacaatcgccgcgctcaataaggaaacggcaattccgctgacaagcagcttccagacgttttttccgatgatggctgacttttcaccatcaagcagagattgataagatccgtagatcataccgatggtgctgaagtttgcgaatgatgtcaggaatgtcgtagccacggcaatcgtgtgcggcggaagtgatttcagctgccctttcagatcggccattgccacaaattcattcgtcgcgagcttgatgcccatcagctgtgcgacatacatcgcgtcatgtacgcctaatccgagaaggaaggcaaacggactgaagatgtatgagaaaatcttttgaatggtcaaaccgtgcatgaacagtccgagtacgccgtttaacgcagccgttaacgccacatatccgattaccatcgctaaaataacaatgaccatgttcatgccgacaagcatactgttagaaatcgtgggagaagaagtctttttctccgcttttgaaggaacgtaaataatatcatcctctttagaaacgtccacgggattcagcatattggcgattaaaagcgcgtttaagcaattcagcgggatagctgtaaacacataagtggacggaaccatcgtcaagtacgatccgatgatcgaaccgctgatgctgctcatgctcatcagcccgaatgtcagaagccgattgttgctgacggcggcaagctgctggcggatgacggctaaagcttccgtatttcctaaaaacatcatctggatggagaaaaagctctccagcttcggcagacgggatattttagaaatcagccagccgattttatcaatgagccacggcagaataccgaaatacgacagcatatcaaagaaggtcacgacgaagataatcgcagcaatgcgctgaagaaaaatcaaccgtcggattggccatgatagacggaaaagcgaacgcaattccttgactggcgcaggaaatcagccatgtaaagaacgcgccgatcttcccgatgacaaagccgccgacttttgtccctaacataaaccaagtaatcagaaactcaaagacgaggagcatgacaatcggacgccatttaatcttcttcttgttgggagaacataagaaaacaacagccatgacaacaatgagaccgacaatgttcaataaaaagtacatgtgagcaactcctataagggtattatggaaataaaaaaagctcttattcgtcacaaattcctgaaagccagaaagtgtgataaataagagccaaaagaaaagaatagactgagagcatcatatgcttttcactcgttcaaatttatgcaaactttcttgtagtctagtcttttacggcactaggtagaaacaatcagaccatattactgatcatatacaagaataacgatattacatgagatagcagtattttatcgtttcaatttttgaaaatcaacctttttagatattttcaaaataataaatttatattataaataaagaaaataaaggatgttcacaagtaa

SEQ ID NO: 11 - DNA, 231132 bp, Bacillus amyloliquefaciens
tttaatatccatattggggaagcaatagcattacggagagtttggggttggaggttaaggatgtatattttgaatgttccacaaccaacagaggttaaggttggcgatactatttcttacaggtggtcatgttgaaaaagtaattggttttgaggaagatgcttctgtaatgttgagactggatgccttatgcatttgatcatttggatgctgataccggggatagaattttggctgatctgatgcggacaatacgtttgttctgtgggatgaggatatggtggaataaatgattgtgataaaaacaggccgatattttaatggcaactgaggacattatttgtcagcaagttaactgtaaaggagttatgggtgctggtttagcaaaacaaattcggaaaaagtaccctaagtgctttgaggactatagtttatatgttgaaaatcggggttatgatgcggatgtacttcttggaggggtacattatacaggggcaaaagtggaaaggtgattgcaaatttgtttggtcagaatgggtttgggagagaaaaacagcaaacagattacacatcactacgacgtgcttttcataatgtaaaaaataaagtcacctgtatggatgatcaagatggagggaagtcggtgctatccctacggataggatgtgggttggccggaggtaactgggatgttgtacaagaaattatagatgaggtatttgcagactatgaggtatccgtttataaatttaagtagtctcccctacctgcttaataaaaatgaaattacatccgatattgataatgttgtatgaatgtgaaattaaaagcattaaggaggttaaagttgatggaggtgtgtgaattgcaaccaaaaataactttaaaaaaggcacaagagttatttgatcaagcaacgaagtatttcacagtagatcacaacaatcaacccgaggagtttatatggtattcaaaaaaggatcaagagttcagactaagggagcttcgtaacggtgttgttccaaattcaattgttgtctttagtgctgaggagatgtttgatcaatcactgaggtatgtaaacaaagagcaaacgaaaaaagactcggtgaggtacatttatgacaagatcaatcaccggttaaatctaatgcaaaaaagaaattatttatccgaagtgaattagtacggtctgttatggggtttacataaacgatggggttgtgacggtgtatggatggtgtaatggttgtggaagtatctgataatatttactcggtttgtttagaggtgtttggaagtattcatgagttaagggcggaaatagacaatacagttaggagaaaaagtatgatggattaatcttgttagatactttattcattcaggtaatggggatgacaggttttatagtatccaagcggatcaaggcgaggttttatggagtacgttcaacatcagggtggttaaaaagagtgatggtgtaagaaagaaaatagctaaagttttgctacacatagagatttgattgtaaactcaacattaacttctgtacaaaagagaatgttgggtgcgggaattggaatataaaaactccttgccccctcccctctttcggattaggattgatttataagaaagagtacgggagggttttttctgtctaaagataatgtaatcgagtttaaaggaagaagtaataaagcggatagtttcctggatgacaggtatattgatttcttggatcactttttcatctataaggagtttttaagtgctacggacagattaggtatagaggttaatgttactgaaggttgtgttcaggttgtgtttcctcctgaactaaatgaagatagtgtaacagttactacgggcaaggaatttattgacttggtgcattatattctagttatggattggggtacatttttcaacgaaaaatgattgactccctattttatgctcgataattttttccatatcccccatctgtttatgtaataatataaaagatgtaaggttttagaagggagaaatgtcgaggatgaatcaaattaattctgcgagagtattcatcagctctacaggacaggaatctttagttgaattgcgccgcattgtagcggatcggttgtctggtgctggtcatttacctcttttgtttgaacataattttgggatgtggactaatgatttgttacgtgactgtttagctaaggttgatgaatctgatgtatttatcttatttatctccaataagtgtggatcttatacgcaggtagaccccaataaaacagttacgtatgcggaatactacagagcgagaaagggaaaaaagataatcataccgtttattgaggagcatatatttaagttctttttgaaccatattgccccacaattgcggcatcagattaattcttatgtaaaagagtatgatcgttatccggattctacatatactgttctgaaggattggtttcagcagttggagatttcaaaccctgtactttttgagcagattgaggaaacacgagtagatttatttaactgggcttttatttatgacgtgtacgttaatgagccttggacttatgttgttaaattggctaatgtggaaagagcatgtgaatttgttttagaatctttgagcggagttatccgaaaggctagtccttttttccaagattttgatggtattcaagaattattagttaatggtgatcagatgcgtgagtctttaagggcagcaaaccgatttcatgcttgtttaaaggatggaggattggatacactagaactacttgaggtgttaatgggttacatgaaaggaagagatgttccccactccaacagcccgttagatgaggatattgttaatcggttgtctgattgtgaagcgatttgtttgtacagacgtgatcaggattatttaaggctgcttgagtgtgtcgggatagtgatccaacttatgaatttatgatcaatgatgaaaattcatatgtagcagagacataccagcaaaacaacgatagtgttgagaacattttttataatgaagaaaagaaaaaattatatctcaccaaaaaacttggtgatttggttatatctttgcactatcgattactgcaggaagattggtcagaaaagcgtgttcagagttatgaaaaacaactattaactgctataatgaaagaaaggcgtcagtttgattttgcagctgatattctaggggtttattaaatgggaaaaaataaagcagtgtatattgggtcaactcctcagaatgtttcgagagaggcagaggaaactgaacttaaaaaattagaggcaaagagtaaagaaattcaaaacaatttaaagaagattaaaatggacaagggacaatttagctatacatgatttttgacaggttaacttgttagttgacttttattcgtggtaatatggggttagtaaagagtgcggcaacactctatcttttaaaaattatctttcctgatagtctttttttcacttggacactcatccgctcttttataaactggatgagtgtccttttattttcgatgaacataattattgatagtgtaaataatatcaatattgaaatcgataataatgtcaattgggttttcaatatcgaaaataacatcaaattttataatgaggtggtttaatgaaagactattacgaaattaaagaggtaagcaatcttgatactttaaataaccacataaaggacggctgggaaattattgagtcttatgctaatgaaggaaagattaagtaccatatagggttgacaaaggatactgttattgaaaatttacgtaagataatcaagttatatgaggataatgggttaaaagatgttctttttgatcgtatcggagatgaattaaatgatgatattaatgactatgaagaaacaacatatcaaccaagtttaaaccctctagtacagacatttaatttttatgaacgttgggtcaacggtaaagaaacaatgttaaaaaggaaagcaggaaaagagcgaaataatgatttagttgatcactctcttcccttttgaactgagataagttaatggatagcaatattaacattgatagtgataacaataatattggtaatgttattttaaagtcgaggagtgttttaggtatggagcgttatgtaattactttggttaaaggtagtgagagaaaaactgaaacctataatcttccggattcagttaaagaggtgtttaagcactgcaaggagaagtttgaaaaaggcggatggaaagttgaatctgttgatgaggaatcatattataaagcaaccaaaggaaagtaattattaatatcgattacaaattcaattgtaatattgattgtattagttaagtaagatgccggggagttcctcggcttttctgtaacttttatttgacaaatatataataatatagtataataaaattaacaaataaagagattagattggagataataaaatgatcgcaactgatattcttattaaattaaacacttgccagggaaagggagattatactgacacttattgtgtttatgctgctgattggtttccggtagggtatcttaatactaagtatagacaggtgaaagaaataattaaaaacaacttagaaaagaaatattgtgaaccgatggaggattttaaactgagatatataccgttaacggtgtttcataatggggaactaaaacctgaaaacattgttcaggcactattagacagagatcttattgaaccgttaaaaaatattaagggtgtatatgcggcaacagaaactttaaaaaaggagttggaagaaaacagaagacaaagacaattgaaatttattataagaacaaaccgggtcatgatgggttcctccaagtgggaacgactagagaataaaaataatgagggattaataaccttatctagcagtattgaaagatttgatagcatcggtaagagagttttagtgtaggatggtaataaactcgtcacagcgagtataaagaggcattaggctgtgagcgttccccagaagtggggaggttgcaacaaattaaggaggcatggggaaattgaataacgacttcaatgaactattattacggcaacttcaattaatgagatcatgtaacgatagtatagagcggaatataaaaattcagtgtgtcctattagttctacttggtgttgttggtttagggtttttcgcaatcatgttaatgttgattgtaaatgggtgactggggtttttacagactgggttacccgtgtatgtagtgattctataaataggtctttataaaattaattaaattatataaaattcgttggaaggcgggtcggttgagtgaagtttaaagatataaaacaatacataagaagcggtggttatgcatttgatgttggacttaggtatttacctgaaacaattaataattatattaatgaatatgggttggaattaaatccagattttcagagggggcatgtttggtcgcaggatcagcaagttaagtatctggagtatttgcttaggggaggtagatctgggatggacatatacttaaatcatcccaattggcacagtggtggagatggttggttcgtatgtgtagatgggttacagaggataacagcatgcttaaaatttataaataatgaaattaaagtatttggtcattattatagccagttcgaggatagagttcctctggggtttggtctgcgatttaatatcaatagtttaaaaactcgggcagaggtattggagtggtacatacagttaaatagtgggggaactattcatacagaggatgaaataaatagggttaggcgattattacttgatgaaaaggcttaatagttagctagtaacggctgaggatactacgagggatttagataataatattgattatactattgatatcaatagtataatcaatatggctttatacattcttgcgaggaggaatttaaaatgtttttactgcgagatactgactcaggaatagtttacaacgcacttaaaaatcctgctgcagtatttgattgtgaaagtggaacagtacataaaatcggtgagagagacaaaatgataaagtttcatgaagatatgaaatcaaagtataagcagtttgggtttgatgatattgctcaggatattaagtttatggatctgccgaaggatcaagaagaaattgataaggtatttaatatttgtgattatataaaaagactgtatcttaaaaaacaattacattaatgtaattgatagtgatgttaatattgatatttaaagatatgatgggcgggtgttaagtcaaatgagattaacatttagagacaaacttgccatattcaaactggcgaatactgcagagtctatcaggccgttaagcgccgacgaggtagtgcttttaaaagaaatttacaactcttgttctgatgaggaaaaaactaatattgaaaatgaagcggtatgcgttgtggagtatttatttagggactaataaacctggagacgtgagatttcacgtctttttgattgaggaagtaaaaaatgttgatgggttatttggtatcatatgtgtaagagatctggtgttagtgaggtgtaatggtgcaaatacatacaagcatgttagagggtaaaggtgaaggtgagtttcttccggaggatttttatttagatggtggtctttcacaaaaacaaatggatctgattgatgtcatattgaaagcaacacctaaaatgttaaaaaagcaggaagatattatacctaaatcagcagcagcactaaacagaaacagtgtgaagataacgttaaggttggcacaaatcataccggtgttgatgagctatgttaaccctcggctgtttattggggataagccgggtttggggaagactgtaatgtctgctgcttgctatagttattatagactcatgatgttaaaaaagggtttacccattaaaaaaatcttagttgttacagaaagcgtacacgtattggggtttggttcagagtggggtaattacgggattaaccttcttccgctcactaaatcaagtacaggtatagcgagagcgcttagaaatagcaatatggatgaatatgatggggtcattacgaactgggacggattaaaaacaaacgggtttctagattattatttacagcatgctgatgagtatgggtatgctgtgtttgacgagacaagcaaactgttaaaccctaagtctgttttatattcaactactgacaacattataaacaaatatcgtgggggaatacctcgggttatatttttaaacgggtcgagttttgaaaaaaatatcttcgatttttattatcagttttcaatattaaaaccgaagttgatcccaaataaaacatttcttgaaagccggtatgttgttagaggaggtcgtgagatttatacaaaagatttttctagattctcaccaaatcagcagcacgtcgtgaagagacaggtaggggaaattattgattataaaaatcaggctgaattacgggaaaggttaaagtactattatatagcccggagtaagagagactatacaaaagatcttcctgaacatagctatatccttcatggagttgagcttactgcagcacagaaaaaggttctaaatgaaaagaaaaacatctctttaataaacagccctaagacgtcagatccgaaagcgaagtttacggttcaaacatcacctaaacttaaagctgttttagagtttgctcaaaaggttgaagatgacagaccaatgatctacgtctataacaaggagtcgcagctcacgattaaaagtgaacttgaaaagatgggttatcgtacagagatactaaacggtgatgtaacggttagtgaaaaaacagacatcttaaaaaggttcaatagcggaaaactggatatgttggtatttaacgtagagaaggcaatgaatgtaccaacatccgatcgaatcattttttatgatatccccacaatgccgcagagaacgaatcaaattaagggtaggattgaccggaacaactacgacaaaaagaagttttatgatttcttctgttatcttgattctccggaaatgtccaatatcgttaggttggcgtactttagggaacaccatagtaatgagtttacaggtcaagtcgaaaatgtgtatggggcgcttgtggggcaattacaggttcattatagggaggactgtttagaagaggtcgaagagaagtttgcttggatggagaacaacaataaaacatatgaagatatacaggatgatgtagatgaaatactgggtctatcctgatggtggggtgagatgtaagtctcactccttttttatttgggtatgattgctgtaacaatcaaaatgagaaacgagtgttataagatgaggttaggttgttattaggtaaagttggatattaaaaattagcggaaataggtgagggggagattttatgaaattcaaggtaaagaaacaagtaatggttatcttctcagaaagagaggtgcgggggtacataaaaaatatagaggttaagggcagaagaaggttgtctgagttagaaaagagtattcaaaaagaggttttattgattcaaagaaaatacccaacagctaatgtgaagtggacaataggtgtagttgagcttcctgtatctgcaagtgcttagaggttgggtggttaggaaggggatttaatttgaaagagtttttaaggagtaaagccggaattgcaactttgactggagtatttggggttcttgttgctgttctggttgttattatttcggtaacgggttcacataaagcagaagcacaggtattaagcaaggcacagaaaacggtagatgcattgtttgctgatgatgaacataaagaactcgctgacgatatgaaccaagatagaattgacgctgcacgtaaggaagtaaaaaaggtaaaggatgaaaaagcacaaagccagcttacattagacattaacaatgctgaggatatgtataacacacaaatagaggcaattggtttagttgatggggttatagacagtgaaggcagattaaaagataatgttaatgaattagctataaaggatgcccgtaatgcagttgttggtgttactaaccttaaagtttatggggagttgtccgaccggttagataaagctgaaaagctgtataggcaacaggttaaaacaattgagagtgtccaaaagcttttcaaggatgaggagcataaagaattagcggacaaagtagataagaaaaagatcgaaaaggttaagaaggatgttaataaaattacgagtaaagctaaaaaagagcaattgttaaaagaagtgaagaaagcttctgatctactgaaaaagaaagaggagaagaagaaaaaagaagaagaagaaaagaaaaaacgtgaagaaaagaaaaaagccgaagagaaaaagaaagaagagttaaagaaaaaagaagaggctgagaataaagaaaaagaagaattgaaaaaacaacttgaagaaaagcaaaaagaattacagaaaaaagaggctgagttaaagaaacaaaaacaggttcaagaaaaacaagaggaacctagatcgagtgagtccaagaaaactaatcagtctgtaagtaaagcaggaaatacagtagcagacatggttccgggtttaaaaaataaaaacaaagcgataattgttacagataataagggaacaaaggctacagtatacttaatggagaaacgtaatggggtttggagtactgttgacaagtttgggtctattgtcggtaaagagggttttacccatcagtttagtgaaaactctacgggaacaccgattgggaatttttcagtagggattgcttttggtcgtaatggtaacccaggaacaaaattgacttggcataacataaagactggtgatgtgtggattgacgattctagcgacaaacgatataatacgttacagactggcgggaacggggaaaagatgaatatttcccagtatgattatggtttccaaattggttggaatctagatcggacgcctggtaaggggtctgcagtctttttccatgtatcaaacggaaagccaacattaggttgtgtttctgcaagtaaaggtaatgtaattaaaactcttaaatgggttgataaaaatacacgtattgttattgcaccacgtaatgaattaaaaaattattaattttagagacagcgtataagctgtctttttattatggttaggttgatagtaatcgaggtaacgagcgaaaggtattcgtgtacactatatatagttaagttattggggggtacgttatggcaagagattgtcgagtatgcggcggaaaagggttccgaatggagaagatcgatggatccctaagacgtgtagcctgtaaagagtgtgggggagtacgtaacttccgagataaattagaagcaagagagccatcagatagggagttggctgaatatataccgaatgcttattttagagcgattgagtttgatagagcggttttagaaaaagaaatccccgtacctatggcggtaagggacatatattttgaagtgtactatgactttatggagaaaatgatcgctacattacgaatgggtcaagtacctaaaaagagctatattgtcacagcaccagataactttgggaagaaggtgtttgtgtattctatgataaaaaacgctctaagggggaacttaaaacctacggagttaattgattctcgggatgtgtatgatcaacttgaccatcaaaattatgcccaattaaaggaatggtttaatgccgatattgcgtttatgacattgggtggtgcgccggctaagtcggatgcgatatcaatcaagactgttctggatatttgtgaacggaagggaataccgttaattgtgttgtctaggtttaacgggtcttattttacgaagtttgatagcttaatggctgcttcagtgggggtaaaagctacgaaggatggagattatggtcgactagagcagcaaggaatattcggggacacgttaaatgcagtcagggagtattacaatactcagcttggaggatccgttaaaaattataaagatgcacaaagaagagggtagaagtaggaggtaaagtatggcgttagtcattacggagcaggatatttttaaatatttggttccacatgaagatgttgatctaaatataaggtctaatactcgaataatgctgactcgtataccggttaacatattcaaggatgagtattatattttataccgggctttcgaggcagcgaacaagcacaatatttggatgggttatgagcaactacatcagatattgttgaataaccttgaggatataattgatgaccctaaagtgacactgtttgaagacgagcaactacctagaaatgaattaatggataaaatactggactatacactgcatgagtacgatgatttgtgctctttggatatcgaggatgtggataacttaaagggaaacatgcaattgtatatcgagacctgggcggttgagaaatcccgggagattactctaaataagctcgaaattttaaatgagggtaaaaaatttgggcgcattttttataagggggttgaggacgctcataactactaccaaaaggcttatgaggtagttagggcgcttttagaagcagatgcgggtaagctatctgagtcgattgatacgtcagtggacactgttgaggatattaatcggaaaatgcaggaggagactgttgcagaaccgattgcacacactggtgtagatcaaatcgacaaacagataacggcattttataaaggtgaaattgttgttattcaagcaggaactggtgtaggtaaaacacgtaaaactgtaaacatagcgtacaacgggttgaagcgtggaaaaaatgtactttatctgtccttagagcaaaaagctacacgtatatatccaatgtttttagcaaggcatattcttgagatgtatggtgatatagtcgagttaacggataaagatatcatccgaaaaacgtatagtatggtttatgagccgcagaaaactgctgcagagattgactttatccaaaatgaaaatattgggcggttaaagattgagggtcgttcgttaatggcgaatgatttatacaattatttagtacgtacatgggaagagggtttccattttgacattgtggttcttgactatctggggttattagaagttcaaggagggcgtcgttacgatgtgttaaccgaaacaattaacatgataaagtcggaggttaaatcctttaagggtaggggcttcttggcgattatacctaaccagttatccggtgaggctgaggatcagttggaaaaaggggaatacgatttattgaaaaaaggtggaagtgaaacaaagtatgtcagtagggcggcagattatgtgtacactttataccaaaatgatcgtatgaaaaaggatagtgtaatgagaattcttaatagtaaggttcgtttagggcaagcaccgcagccattttatatggctgatgttgatttgggtaaatgtgtgtttgttggacgaccagaggatgaagatgatgacgatgatctctaataagttggggtgtagtaaatggctgtagataagggacaattggagaaagctagggaaattctaattcaagagattccgctctcaaagtacattagagataatcggttagggaatgcagataatgaatcaggaaagattaattgtcctgttcatgacgatagttccccatctttttactacgatgataaccttaaaacgtgtaactgtttcgggtgtagtgttaagggttccgttgttgaattacactacgccattaagaggaagacagatgatcggtatacacaagttaaggcagtcagggacttatctttaaaatacaaggtaaagctgccaagtttatatgagcgtagtgtcgatgcaaaaccgaaacatcaacttagaccttctaaaagaagaaggcattcagatttgaacgacgaggtgatgtataaacggaagatagaaaagttagagtatcagataaagtttatagaagatgtggacactaaattaaagttatataaaataatcgatgatatgtgggaaggcaaaaaaccgtctaaaaacgtatatgagacattaaacaaccgaatcaaaaatcttagttagtggtgtagttggagggaaaatgaatgaaggacgtgagacattactatgaaataacggatcggaagaaccaacaaaaaacggttaagaggaagtctccggttttaaagagtgagattgaggaaccctgttatttatttttagatcagtcaacaagttctggttatgctgtgttcgacaataaatctcggttggtgttatcgggtgttgtacaaaaaggaaaatcctctttgcaggaatataaatatgggtttcgagatcttatacaagaattggtggatagttatggggtttcgactgtatttcatgaagaggtttatgatgccagtaacatgataacaactgaggtacttttctacataaaacatatgattcaggatattggatatttttctgagaaaatagaagttctaggcttagaccatatgaagtggaagtctgagttggctaagcccgggaaattcaataagtctggggatcacaaaaaacaagttaaggaacttgttgaaaaagtgtacccactggttgctctaactgcagaggatgaggttgatgctataggtatgggtgtttccgtccttattaaacaaaaaaggagagtaaacttttaccataccacaaggtataataaaaagctgccactgaatgagtttattttaaaggatgatttaattgaaggcagtgagaaagatacaattaaaaaactaagaaaaccattccgggatgcttatgaaattggtgggctgcatgaacttcctttagatacacgaagaaaagtggatgatctgtttcgccggtttctgtcgcatagggatgccgtggtttatattcgaatccccaaaacgtataaatactggggagtgtatttgcttcaccacaatataagcccgcaggatctgattcaagatgatcaatcgtttatccttatgtgtagccgaaaatcccgtttaaaatagatatttttatagagtgaaagtcgactaatcaacatatgtgggctttcactttttttgtgttgaaatttattcaatagccttatataaagggggctatttttaaatgactattaataatattaaagatgatattaacattgttgaggatattgatcaggatgacatttctttagaagaaatactggcacagtattcaggtgataatgctgcggatgatagtggcattgagcaaaaaacaaacggtgaaggtaatgatggtcacaatgttgatattgaaaataatagtaaagaggacaattctaaaaacgtagcggatgatgaacatcttgatgagtttagtaaaagcgaatctgacataacaaattcgaatggtgcagacagctatatcgaaaaacccatggttaataacccggacaataatgttgataatgaatttaataatgaacttgaatatgaagaggatggtgaaattgatgatgataataaattagatataactgaacgtgcaaaaaggattaaagaagctttggaggagccagaagtcgttaaaacgaatttaactgcaagtttagaggacagtgagggtaaccctattgagccaagaaaacggggaacattggctgtccaagtaattagtattgaaaatgacttaaagcaaacaaaccgggtgcgtgtgggtgaccaggatgtttatgatctgcaggagtcaattaatagatttggtttaattgaacctattcatgtggtgccatttggtgattattatttgctgctgaatggttatcgcaggttggaggcgtgtgtcaaccttgggtatacggaagtcccagcgttggtagatgggacaataccccaacaatggttaagtattatgaggctattttaaataatgtaaagccttatcggttctcagagaaattaaaacatggtaagcacatccgagatacacagaaaaacgtttcttatgcagctattgaagggatactggggttaaaggctggagagttcttaaaagctttatatattgatcaaatgaaaaatgattttcctgacgtctataaacaggttgagttggggaagatgactattgagcagggttttaaaaaggttgaaaaagaggttgagaaaattgaaaaagaagctgctgcagttgatcaattaaatagtggtgaactagatgaaaagttacgagacaaagatgagttggctgatttgcagattgaaaagcaaaaacaaactgtaggggatagaaaggtattggatccggttattcggaggtcggttgaaacccgggatgggggttattgtcagtgttgtggatttggtaagggtgagcctgattttatgggagtatttaatgtgcaccatattattcccgtacaatatggtgggtctgatagtaaatctaatttgattttgttatgccacaattgccacaagttggttcacgactatgagtctggacggtttacgcctgagcagtctacttttgatcgaagaaatgatgtaaaacgaatcgtagtattgggtaatatgcttttacgtatgagaaaagaggcattacatgtattaagaacaaaacataaagaggtatcgagacaggtcgataaaggtgtactatctgtcggtaaagggttgttaaaggctaaggtagatcttaaaggtgaggagaagtttggggagtcgccgtactccacgtttaaagatgccacaatggacttagatcttggtgggtctgtaaagggagacttgggggatatgtatttagataatgaggaagataatgcagaaaacgatagtgtgttagagaataaagtaatgtgataaataggtctgttattaaacagacctatttttgggtggcaatttttgtactgatatagaacaacaatatgaatagttcattatgtgaaataccgttgacatacataggtaaaaagacttacaattgtaaatgtgaatttagtccctattttaatagaatatgggttacttatatttttgttggattggatagcgaaggataccacgggttgcttctgtttttgtatactaacatcagataggaatgtaaaaatgaccggaggggggttcatttggttaaggttaaaacaggtgatgtcttagtaatgcaaagaggcaacacatatcatgagtggttaatacgagatatcgctagacgtagaggatatccaattaaaatggtcaaagaggatatcaaagaggttaagccgtataggtatggcacattaactgctggaagagaaattgtttggataaagattgataaaaagccggcaattctagcggaaatagaaaaaatgaatgtgacgaaaaggatcgtagttcttgaggtatcagggaaggaaataagaacaagaattaaaaagttcccggcaaaaaaatttagggttattaacatgccttttataaagacatatgaagataagcgagggacacttgaacggatcgtatctaggtggaaaccagaatttgagtcaagcgaggtcgagaagggattaattcgtcttatgattcaaaatgaggaaacgtgggacgacgttcgtctttcaattgaaattgcgaataggcaaggtaaggttattacaaaaaaatctttagaggaaatgttcccggaagcggagttttataagttagatgattggatagataagctgctgaaagggcagcttaaacagaaatcattaaagatggctgaatactttataaatgttaagggttattctgtagcctggttaatgaacaagattagagagcaagcaaatgagattagtttagtttatcaagcgtataaaagaggcattttatatgttccgtccagtcagtcaaaaatacaagagagactggatgttgtaaattggagtcaaggaacagctcttttggagttgagtaagagggatcaggggagatacctcgaatttgtgcaatcagtagattatagatattttgtaagggtattggcggtgttatacagcgccgatgaattcgttaaatcagcgggtgatttatatagagtattggaggaaatccgtctggtaaggagcgaatttgagtagatggcaagtgtagcagtggtgtcgggtgacttaattgtagcgaatggtactgtagtggtggcgaatgggattattagaaacaatcctttttcatcaaagattgtaatgagtgaagcaacacagtggatgattaggaatgaagatgtagtaaagaaaagtatttggtattggttccgacactgtaaagttagtggtggaaatgtagatgattgctttgaatatggattaaattattttattgagaaaaagaaaagagctttccggaaattttattttggaaaagagtcttcttatggaattgaaaattatgttttatccagtattcgcaatgttgtgcaagagtatagatctaggatgaatgatggccataaggtagtaccattcgtaacaagtgaggaaacagatcaatttggagctgcagtaggtaaggtagaggaaactgtaggtagcgacacaattgttgaaacaggagagatggttgtagagtctgatgaaaagtactgggatgaacgattcgaatggttagcggttagttttcagcaatttgttgaggatcgtcagtacaaggcattttctgtggaggactacctgtactacatgtttttacgtgtagatactgctgatattgaaaagcacagagatattgttgctaagaaatgtggggagtcaaaagatctaattaagatggtaacaagagactttcaaatggaagttagagatggtaaagagtacgctgcagagatgttggtactcattaaagagttattggatggagttcaagcggggtggaaaccgctacatattcgtgagggagtgagtatgttgaatggcgactgagaccggtttttttgacggtttaggggtgatcggttggtttggtgtacttctatgggtagcttttattcttgctattgtgtttaagccgaaatggttttttagctattatgatagagtacctaaactgaacgcatttgacgaatggatgtatactcctgaacgtatttttgggtttatggcggtaaggtttatcgctatggtgattattgtaatagtgataggtaaagtaatgtttttattttaggcggcgtaagccgtcttttttgtgggggtgaggctattgtcgggtttagttggggcgtgtgttagtgcggcgtttattgtttttgttttggggggattatgcttgttaggttattttgttaatcaggatccagataaagcaaggtggtataaacggattggtatcggattactggtactatcggtggtcggggttgcttcgacttttatatttttacttgattcatagagtttacctaggaataatcttttctgataaaatgtgataaggtgctaaacaaaaagtggatactgaatatgatacaatgttttagaagttaagatagtgggggaagaactgttggtgataaacacctaacagttttttgatgattgaaagtttacaattatccacatagatattttcacaaggagagggtttaggatgtttgctatttattttgactataaggatttaggtcagaatataatgttaggggttattgtttatgaggatatggacaaaattatacaggaaacaaaaacaattaaaaaatcggggaaaacgaattttgaccatacactagaagcttgggtctatgctacggaattagtaaaagaagagggattcgatgatattaagtttctaaatcaaaataaactcatatttgattggcttgctaagggaaattacaccgaggagcgggctgtatattacgaccaaattaaaaagaatatgatgtatatgaaggctgatggtgcgaatgcgcttgagtatgaggttattaagggagataaaaacgaagctaaaaaatacctcaaaaaagcagtaactactgaatcacatgcaatcaagggagactttatggatgttttatttagtcaagctcgggatgcgaaagtagttccaattaaaaaacgtaagcgggcgtaatacggggagaagattaatggtaaaggtaacgttgattgctagagatatagagaaggaaaaagaggttgagtttattcttcttcaaatgaagaagctaaaataggaggtaacaatggggatgtatagaggaagaactcgggttcgaagataactaagtgagtaaaattttaaccgaagggtttagtcgaggaggttggtattaattgcagcctctttttattttgtttaaagtgcggtttatcgtttgtgtgattcacagcgtaataaattaccgcagaagtgatgttatggtatagctgtaaaaagagtttatagtgagggagtataggagtggttttattgattaaggtgttagacaaagtgcttgtaaccaatccagatcaattaaactatctggaggttggggttgtagttgaccgtgagttaggcggtgatgagattaaagtaagatttaataaagaaactgaggtttggtataaggaatccgatgttaagttcattgagcatttggggtacccggataatttgattggaggaggggttaaggtcggtgaccaagtgcagggttggttttttggtaaaacaggggttagatcgaagtggtatacagtaacaaaagtggatggggatacggttcggggtacgactttgggtagttctgatgaggttgaggttgaaaacatttttcaagtccagaaatgttcagataaaaacgacgatgactgttttgtaaactatataccaggagagtagcagcacaaggaaagcagatagggttgtttaaagattagtgttttaggtgagatattaaattttcgggattgaggggaatacaggtgaaaaaacgaaagggtaaaaaaagagcatcgttgggtgctgggttacttcttgtagctggatatttactttttggtgggaacacagatgttgatcatctaattgaccgggttaaatctgttgttggggtaagcggtaaggttcaaacaacggaaaacacggatattgatcagtaccgggttggggacaaagttgatgtagagatggttaagcatgttgatggtgatacaacaaaagtaaaattaaacggtaaagaatatacggttaggtacttgcttattgatacaccagaaaccaagcaccctaaactcggagtgcagccgtatgggaaagaagcgtccagcaggactaaagagttgttgtctaagggtcacatacagatagagttcgatagcggtaataggacagacaagtatgggagattgttggcttatgtgtatgctgatggggtttctgttcaggaaacgttattaaaagagggtcttgcaagggtagcatatgtgtacaacaaaaaggctatgcatttaaacgagtttgaggaagatgagcaagaagcgaaacaaagagggttaaatatttggagcaaaccaggttatgtaacagataagggatttaatagtcggaattagggggatagggttatgattatatgttctatagaagcaattgatggggcgggtaaaacaactgtattcgagcgtttaaaagaggatagagacattaatgatggtagtttacatattgagtatgctaggtttccaacagatgatttttaccaaatgtataagcggttaaacaagccaagtggagatgtgtttttaaatttgcataatgaggataagagatctcttgttaagagtgcaagaagtcgtggagtcgatttgttgatttgcgatagaggagatgttacacaaaccgtctataatggtcaatgtagtaaagataccatgtacagcgatttagtcattttcttaaaaacgagtgttgaaactgcgatgaaaaggatagcgcatcggggaagtgaagatatatatggttttgagacagaggataagttaaagcacattgcaaataggtatttaagggtgttaaatcggttagattatcgtggaagatacgtagaggtagtaacagataacaaaacgcctacagaggtttacaaagaggtcaaaggttatgttatttcatttttatcaaggaaatatgcaattataggcaaagaatgattggggaatttcattccgatacgtgttaaaagaacggggtagctattatgtgctaccttttatttattagatcgggaggggattagagtgtcaggtaaggtggagataacaggagaaggtcaatggcgtaagggtataggaagatattttatattgcagtaccaagtagagactacaaagagagacgaagaggttgaggagatttatttctctaacatcacaaaacataattgcaaaacaatcgaggaagtattcaatgtagtaaaccggtggcagtcactggggtggaagaacattagtgtcacgactcaggttgtcgatcgaaagggggacgttgttattgaggagaatgtgttagggattgattggcttgaaaatgaacaattgtcggcagaacgatgggaacttaatgaaactgttcaaagacaagaaaaagagttgaacttatacaggaactttataaaacagtataattcggaaaggctgttcgatgagtttaagtgtgggcaggggacattgtattggtatgaatacaggttgcgtgggtttagtttagggtgtcagcctgatggtcatgtaagggttgatcataatcggggtaggtttggtgctgtagcgtatagtaagcctttaacggagcaacaaattagagattacgagcttttgcctatatcgggtaactaattaatttgggaggaatataatgaaacttgaaaagactgaaccatgtaaagattgtccgtttataaaggggagttcgactaatgttaccctttcaagggaaagaattcagggaatagtagatggtatacggtataacgattgttcttttacttgtcataaaactttagatttatctaaaaataagcagcagcattgtgctggcgcaatgatatttttatggaaggataataatcctaatcaaataatgaggatatatggaaggttgggtatgtttgatccagataagttaaatatgaatgctgatattatagatgattattgaggggagtttagatgctcccttttttatttgacatttacattcataaatagtatagtaattttaacaaaaataatatgtaaggaagtgttttgtatgtcagaaccaaaggtcattaagtgtgaggaatgtaataaaaaggtggagttacttagttcatgggctaatcaatgttcatgtggaacagaatataacgggtttggtcaaagattagcggatagatctcagtggggatatgagacaggggaaactttttaaataggggttcattcttttgaataaactgcaagttcaatactgtttagagtcggagatgttgtggggggagaagtttgattcttgaaaaggtaacttcaaaaatatacagaggtttggagaggaatttgtttgaaataaccccagagggagaaaagaaattttggcacgaggaaaaggatgagtatacccctgactgggtagttagggtactggaggattcaactattaatcattatacatctgatttttggagtccgatcaatttgggaaaatttaaacatgtattgctaacgaggaataaagatttcgaatttagggtttttgaatttggagtactgcgtgttacaaagaataggtgaagtattatagcatttagggggaagatggatgaaaacagatataaatagcagcttaatgatattaaagtcagagcgtgatagcgcagcgttaaagctgaaggatctaatagatagtaccaaacatactttgaacaggttagagtctaagctaaagagtaataagcggttgtatgattcagatagccttcaaggtatgggaggggaaattgatatttatataggtaaattggtttcttatgaacgggctattgagaggctaaaagagcatgtagatacggattcaggtatataatacgagatttgttgagggagattaaaattgatctcccttttttatttgacaaaataataataaaatagtataataaatttaatagaaaataacataatccattggaggtaagtgtattggctgcaaatatggatgatactcgggttattagtgagtgtgtagacaggaatggtacaaagcatcaagagattgatacaaagtgcgatagatgcggaggggctgggaaatcagataaatggatgtttacagggaaggtttgttataagtgtggcggttctggacgaatgagatgtaaacgtaaaatttatacaccagagcatgaggagaagcttcgaaaaagaagagaacgtgcagcggagagaaaaagggaaaaggctattgtggaatccaaactcagaaatgaagagctatttaaaaaatggggatatgaaaacggaaagatttatgcggtattggggagcacatataacatccgagaagaattaaaagaggaaggtgcgatttggggagatcagacaatcgggtggtacttttcaacaaaaccggagaagtgggaaacagttgagttggatgttagtgagttggtttggtacaacgatctcggtgaggttcaccaaaaggggtgcttggagtacaaagactatgtcaataaacaaaaaaggcttaatgaacctcctagtgaatgggtaggaagagtgggggataaagtagatctagtattgagagtggtcgattcgttttatgtaaattactacaacccatttgcttacgggacgtcgactgtctgtataaataagttgagggatggggacgggaatatttttatttggaaaacatcaaaaaatctaagtaaccaatgtgatggtgagggaaaggttaggattcggggaacaattaaagaacataatacataccaggatcaaaaacaaacagtgcttactcgctgtcgagtaggtaaacagggggaataaaggtgaaggtaacgatacttgagtactcaagagagcacgcttatgtgagaatagagaagggcggaagagaatggactacattttgggctaaggcatttgatgataaagggaatgtaataagcccacggttaaacaggttaaggctgcttttagggaagatcctgcatcatttaaataaaagttatggttaggttcaagtatatatatggattctgaaaatgatgtgaatgggggtatccaaatggataaaaaagatgtagctcaggtcttacaaaagaattatgattacttccttaatcaaaaaagggagtcatgttccgaacatgagcaaagagaatatggaattagggcgaatacagtttggattttatcgcagcagttaggggtaagattaaaaacggaatagtggtttagagttcgttgattaatgaaatagaattaaaaattagtatgcagcttaaatggggtacgtcctgtttaagctttttcattatctggatacaaattatagaagttcatataaagattaagagtataattgattataaaaatgaaaagaaaaattttcaagataagtcggaggtagggtcatgagtgaaggtgtgaaggaagaacagggcgtaagtatttatcatgatgtcaatgagtataggaaactcattgggtgttccgaatctgttgcgcgagagagatgtgaatattttagagggttgcagaaaaaagctgaacattgtaagtgtcctaatgatgattgtcagttagatgcaaatgaatgcttaattatcgctttgggtgaaagtagtcaggggtcttgggtttattgtcaagagtgcgaaaaaacctttgatttaggggacaaacgaattgaggattgggttaattgtgaaatggtttttgatgaagttcttaggttgtcgctagacttaacgttagaggagagggtggaatgtgtaggtggtgattggaatgaatttgtttcaaaatccacgtccgaattattgatgaaatgagaggttggtcagttatggacagggagaagattattgctattattaaagatgagtcagagaagttaggtttagattatgagatggttatgtcttggctgtctgagttaaactttgaactagatgtcgttgttggaaacccgctatttgatggatctaaggttaaaactgcagtcgaaatggcgtaccgtgtttttgcgtagtttggggtgtattatggtgtcaataaatatagttgtgtgtatgttggctgcattggggttaattttcttttatgctatctgtattttcggtaggtggaaggttttccagataggatcaccaatagtgtttgcgttacccgtattatttgttgggtttgctgcagtggagtatgtaataacaccagcattaatatgggtaatgactaaaatagtggataacgtttaggggtgttgttgatgtataagtttttagctgattggaagggggtagtagttgactacaacccaacttatcggaaaagaaaagacaccgggattcaatatatgttgaagaaaatcgccgaaacacaaaagtttgctaatgggatgttcaataaaccggtgacgctgtttgtataccaaaaaattaatggtgcatacaaagaaattgaggttatagaggttccggaaacaatggaactataatgggtatgattatgaatatgttgtttttaaaagtaagcgatgtaatgggattactcaatagagataagatagtataattattgtagaacttgagtaggagggatacatatggcggttaaggtgacagaggacgaaatatttcaaatagagacggaaaagagatttggtgagtttctcgttaaaagggtaaatgctagtaatttggatgtttatcatagtgatgtgatagtttttcaaggggaagactacgaggtagcagaatacattaatcaacaatgactgcgaagaaggcattagccttctttttttatgattaaaattcttcacaggcatctgtttgtgtgtgataacatgtaggtgatataaggttggataactgaggtaaaaaatgaatttaaaataagtgttatgctttcgtaagaggaaaagttttaaagagggtgtgaaataaatgtatgcattgttaggtggggagaagccaaagagaaaagtctctgcgcgaataaaagtgggggatttggacattcaatatgttgcagcatctactagggagcatattattggttcagtaaacggtgaagtagtgggaagtatttatatttccgcaagggttgttaaagatctcgatatgaaagtggagaaggttcaggtagccgggagtcgttgggaggacttgcggtttgtggcggggttactaccggatgaggagcctgttccagagcatacaattgagtgggacaaatccccgaagggaaatacaaataaaattaaatcgttggagtaccgtgacttagcaaatgcggggtctgtatccgcagccaagcttaatggcgggattgaagattatttatatgaaaatgttccaattgaagaattaaaggagcagtttgatttatcctgggctgatgataaggattatcgtattttaatagaagatgatgagatacatgaatgggtagaggggttagctcaaactgacgatatcgtgggtttcgatactgagacaactggtttattggtaaacagaacaaaaagggataagctagttggtatttcaatgagttatgaagatcatactggggtgtactttccgatcgctcatgagcggtacgagaacgtccgtatggggacgaaaaagcttctggatttattgaaaccgtattgtgatcgtggaagtaaaaaagctaagaaacttgtaacacacaatggtgggtatgattggcgggtaatgaagatgtacgattgggacttaaatattgtgtacgatacatttattcgtcagggtttatcggctatatcagaggctaaatatattcggaaactaaaagatattacccgaaaagttttgggatacgatgttgttgagttagaggatatgtatagacctagaactaaacaagaaattgcagcggttaaggatgcagtttttgttggcggtgcttcggttaatgaaattactcggttcaagctagaaactgcggaaaagcaatcagatttaatggatttccggtatgcttctagggatttctcagaactttacggttcagccgatgcggattttccaaggttactacataaaattatggataaagagtgggataagtctcttgatttaatatatcgggcagagattgagttgataccggtattaggtgagcaagagtattatggtattcatgcaaagcgtgaagattttgacgtattgcatgaaaaggcacttaaacgaatggaagagttggaggaattgatttataaggaagccggaagacggtttaacataggttcttctcaacaaaaggcggaagttctatttgatcacttaaaattgccgttcttacctcgatttaaaacgaaaaaaggtgggcgttctacagataaaaaggtaatggaaacgttggagcaatataaggatagtaaggggaacaccaagtaccctatcatacctttaatgcgggaatatacaaaactccaaacgttggttaataacttctatagcaagctgccaaaacggattgtagataactttattttttctagttacaatcagttgggaacagaaacagggcggttaagtaatagtcagccgaacctacaacaaacagaaccagtttctcgggcgtatatgactccggattcggatgattattatttcatgatttgtgactattctcaggttgagtatcgtattatggctggtctaagtggtgaggataaggttacaagtttcttcgctgctaacaaagaagcagattatcatatcctggcttacgcaaatatgatgaacaaggcgtatgaggacgtaacatctgctgaacgtaaaacaggtaaagtgcttaacttcggtacttcttatggcttagaggatgagaacttggcgctcaatctttatggggatacaacaccgtttcaccaaaaaatggctagggaagcacgcaaaaagtatttcgatggcgtacctaaacttagagattattttgagtcggttcgggatgaggcagagagagttgggtatgcaaaaaccctgtttggtcgtaagagaattattcatgagtttgcgtatagtcgaggaagagtttctgaatataagaggggttctggtcgccgtaaagcgggtaatatgccggttcaggggacagctgcagacatcatgaagtttgcaatggtgcgtgtacgtaatttgttcagaaaatacgggcacacagaggaagaagcaagattggtactaaacgttcacgatgaaatggttatgcaggtacacaaaaagttgaatccttggtatgtgtgcatgcttatgagggaagcaatggaaatggatctttctaagtatggattcccacctctctacattggagcaaacgtggggtattgctggaaagacggtaaagccgatgaattagaggcgcctgtaatcttaatggatgagaaaattgcagaagtaaaagaaatgatggatcgtggtgaggagttacctacgtatgatgatccaagaaaaatgtgggcggatgagatcacaaaattcgcactcagggtgattaaagaagagatccaaaaagatgaggttaagggtctggagaaagctcatgaaaatggtcgtttggttaaatatagccaccacttcggttctgcatctgaggcgataattaaagagttaattgtatctacaccagaaaaggtgtttaaacgcttagacaaggtgcaagaatttaggtctaagctggcctataagcacatggataaactcaatgagatcattacctctaagggtgttaaagcgtatgaggatgccgctgcgagagatgatattagacgtattgcaaggtatttcggtaagtactcaggtaatgttgtgaagtggttaattgaggatggtattgattctgtatttggtacagttcatgagcgaattaaagaagatggttttaaagctgaggaacttaaaaagccggcaccaaagaaaacgggtgttgagttagaggaagaaaaagaaacggttattagcaaagcgaaatctatgctgaaatataacaaaaaaaccaaccatgttcggcttatcatggaagagaatgatactgagttgtttagtctaattgataaaatgttaattcctcagcagaataaaaaactgttcagggatgacttaaaatttgttacgtttgaattggtgtatgcgtctggagattcctataaacgaagtggttggttatggatagcaaacttcttgccgattatgagggatatgctgattacacatttaacaggaggaagttatgcgcagtatgctgatcggatcgagaagatgggttcaaccttcgttaaaactgaggaacagattaaaagggaagaagagaggggtatagacacaaaaccaatgtctaaagcggagcttaaacgaagacaaagagaatttgcgaagttaactaattgatggcggagctgcggctccccttttttttattaatgaaatacgtaatctttacaaaaatatataattaatatataataaatttaactgtattaattatggggtgattagtagcgattgtaaatttgctattaatgataaagttaagcccttaaacaaaacggcgggaagtcgggattttacaaatagtgctacattttacaagatgtttgagttagctcaggattttttgtatgtggtaagagtgaatgtgggggagtctgagagggttggtgaaccgtgttattggtgtggggttcatccaaaggctccaatggatacatacagagagtcggatttagttaagtatgaagtttaaaaacacaacaatgtttggggggaactttaagatgggttatgaaaaagaaaatgaagtaacgttgcaaaagctggtggaggaggttaatgagtttgcggaatatctagttgaggttccggggcatcctggaattaactataaattcccgaatttgtatggggcgtcagttatacaaacaaggggttggattgagttagctgtggtatggtttggtcacagtatagaaggtttgccgggaggacttattatgtacgatacaccagttgtagaacatgaggttgaggtcgtagaaaacagtgaggggttaggaaaattgcttactgagatatataatcttccgaaaagagaagatagttgactagtggggaaaatctgaattaaagacaatgggaaagcaaggttaacaataaggctgggggaaggtaaagtgaggattacaaaaataccgttagattggttttaccgtaaggatcccgattgggttaaatatagggagggttttcagcaatacggatatgaagaagtagttattgatagcagatctgaatatcggagaactggtggtcgggttttatcaatatataacaaaaaagtaaagagtccgtcattaggaaagattgcagctaacgctcaggttatgttattggagtcactcaaagatagtgatgatattgctgtgttgttggagatcaatatatttgagggaataattaaagacatagtgggaagtttggataaggttccaatcattattccgatatttccggtggatatagaggaggtggagttggaggcttgtgattggttagcagaagcggcactggaacgggtgttgaatgattatagaagtattgacgattaaaggtatatgggagtgtgtagttaatgggtacaaaacagaagttttatacggtggttgttttaggtgaaaataaaaaatgggttgtaaaggcagatagtgaggaatcagttattgaggcttttgtacggtggggctatgcatcgtctggcgaggatgaggttaagattgtacatacgtcaagttcgttgaagaaaacaatgattagtagtgggtttaaggttgtaacattaaaagatgtgcgatccggtaaggccagagatatgtgggtagatgcaaatgatttaaaactgagagcctaaataggctctcggatttatttctaaagatgggtgttgttattacatacccatttgttgttgagcgagtctgactaatcgttttgtaatttcaccaccaacagatccattggcgcgtgatgtcgtttctgcacctaaattaactccaaattcattggctatttcaattttcatttgttcaattgctgattcagcgttaggtacaagaagttcatttcggttgtttgacatagtagcagctcctttatgtagtatagtttacttgtatagcttgtgcgaaataacaaaacctatacggaatatatgtgaaatcagaagtttttcaccacaataaaattggtgtatattttttaagggatatgtattgtataaaagttaattaactagaagcaattaaggttagaggtgtggagtaatggatgtaagaagcgataaagaaaaaataaaaaaattagagttgctgatggatcagaatccaaattggacggttgggggattagttaaagagataggtgagtcaccaagatgggtgagagctaaaattaaggggatagagttagctaaaaaaataaaaaagaaactggaggacaatccagatatcactgtgagtatgattgcagaggagctggatgtatttccggctcaggtataccatcaaatacagttacatggtatggattacagtgaacgaaaacacacaaaaataaacgaccgggtagtagaaaacttaaaaacgttagttagcaagcatccagattggacggttagtcagttgagtaaagaactggatgttagcgcaacttcggtttggcatattattaaggacaacaatattgaatatacgccgaaagttattaaaaataaggtggatgtggaaaaattaaaagaggaaattaaaagcaaccctcaatggagtgtaaaacaactagccgaaaaattgggtgtgtctgaaaatactattagaagaaaaattgagaaatacaatattgaatatacgccgaaagttattaaaaataaggtggatgtggaaaaattaaaagaggaaattaaaaacaaccctaaatggactgtaaaacaactagctgaaaaattcggagtggctgaaaatactatcagaagaaatattgaaaaacacaatatagtaagggattagtgagaggttgtggattatgtgccacaacctcttattttgattgcggggttgaccgcaaaaagggtgactttagataagatagaggggtaataaagttaaggaaatagggtgatgttaggtatgctaataaaaaagagaatagctaaattaagcactagaggggtttacatacaggatcagcagttatcggatacagattttagtccgggaactaaatataaatatcaggtggatattaagaaaaggcaacttttaattgttccgtctattgaagatgggaatacagtatctagaagaaaacttaaaacagggattaagccggtaatagacattagaaataaagaggcgctttccgtatttgatggtatggatgctctagagatagagatttttcaggataaggtaaagataacagggatacaaaaagaaaagattaaattaggcttgtacgataaggtaaagtcaaccgcttcaaaaatatttcagtttagaaggataggaagttctgaatcctcggttcttattaaccgtagagatttaaaaagggtcgttggggacgttagtgagtttgtaccgcgaaactacggtcacgtaatcccggggtatgaagatgcggtacgggcaattagtttatttagtggggcaggaatccttgatcaagggttcattgaagaggggtttaaggttgttttagctattgagaaaaatccagatgcagttgaaacatacaggcataatcatggggatcatattgtagaggcagacattaaaaagttcaattttttaaagctatgggaatataaagcagagttgatgtttggaggaagtccgtgtcagggtttatccccggagaaccgctatacaaatttcttagacaaccctaacaatgaattaatcaattattttatagaaggggtaaagtcaaatccatattgcaaagtgtttgtattggagaatgtacctcaaattttaacagcgggtaatgggaagtttaaagatgagatctacagcaagttatcagattttgaaattacgtctggggttataaactcggcagggatgggggatccgcagatcagaaaaagagcgatatttatagggtctaaaataggtaagattgatttacctaaagagcatataagtgaggatcggtatgttacggtacgtgaggcgtttagggggttgaacgacagggtaccaaaccagttggatatcacaaaatctaggaaagatacattaactaagatgagttttgtaccgcctgggggcaactggaggaacatcccggatagcttaaaaacatcgaaaatgttaagtaaaaatggagtacatagtgatatctataagcggttggagtgggataaaccttctataacaatcacgaatgtaaggaaaacactattactgcaccctatgtttaatcgaattttgagtgttagagaatgtgcgagattgtttagtttaccggatacgtttaaattttttggaagtctggggagtaaacaacagcaacttgcaaatgctgtacctgttaagttggctaagagcgtagccaaagcagttatgaacaagttcaaaagaacatactctaaggggtcagtggttccaatttattgataggggaaggctgaaatgaaagaggacaaacaagagttacttgagacagtgaaagaagagttagcgggtatggagtactgggagattcaaaaatttttagttgcggctctattttataaggaagggatagaggatccgggttttgttttagttttgtctaatgaaagatttttggagatggcaagaggtgttgaaaagttatgaagaaattataagagaccttttgaggtctcttatttaaaattatcccttacagcttttgtgagaagttgtatacatcgatctatttctgcttttaaacgacgtttatatttcttagctgcttcataatcctcaaattggtatagaacaacctcctgaagcttggtgccttcttttttcacctttatttgttttaagattccatcatccattaacgaatgtagtgcccggtaaatttcggcgtgtgttggcgcataacctaagtgtttaaattcctctcttaatgtatctctcagttgcatgccgtacagtcgattttcttcggtcatagtgatcatatagagctttaagaaggctctttgtttgaggagaaaccctgtgtcttttcggttatcttgctcgttcatctcgtttctcatagtccacctctttttttattttattcgcttggatcattgtactaaaagaagatgtgtaagtccaaaaaactgataacggtctatgtttacatttatataattattatgtataataaaaatatggaaaatataagggaggtaaatgaatgttgggggttcatgggtttgtggagaagttaagtaatattaataaagaggtcgattatttatataaaactgattgtgttcagttgttatccgaattggctgcggttgaggatgaggtaaaaaggcttaaattaaatttatttctaaagagcaatgggggtttatccggaaaagagttacttgagggattggtcagagtattggggatagatgggaaaccgagtataagaaggttaaaaatatggaatccgtcaggagttaaaggtttccggttatgtgaaacgataggtgtatacgattatatggtttgtgattggagttgttatggaaataagttttcatggcaagaaaaacatcatgtatcaaaaaatcaaggatctgtacagattgaggaaacgtttgcgtatttggggcaagacgagttaaaggtaagtaatgcaagttagggggataaagatgaagaggtatgagactattgtggtgcaagagacggagggtgttatcagtaaggggtatattaaggtgagaaatttggtggatggatctactactcaacatcatcaaaaaacagttgatgatgtaattcgagatgtaaataaaaaagggtttatgttgtgtggaatagctaagggggattgtggaagagactccttttatttaagtagggaatgtgatacttacaaataggttgttaatgggtaaagtggatagttgggagcaccaaatattaatttgagggtgatataataaggctataaagtaaaaagaaaggtgacgggtatggatagagtttttactgaacatgaaaaattgatcaccatacatagagagtataagcatagtttggaatacgctgctacagtgtacaataacagtcagtcaatgcagttttcaaaagacacaccgagaaaagctatagaggcggaaggatacattttatcgttaaaggtaaagcatgaggttctgcttcaggtgcttgctgatgggaatatggatgaggaagagtatagggataggctccggggaagtaagattattttaaagaaggtaagatccttgttagctaaggttaaagaagattatgatgattttgatgaggcgatggattcttttaggtctttaactaatgatttagaagaggcggggataattaaaaagaagaaaaagaaagaaagcgaaagttaggggcggttaaccgcccttttttcatttccaccatccgaacggatggggtcagtaccgggttcgattcctggtcacaatttcaagtgagtttgggagcctagtccgggttcgattcccggagtttggaaaataattttttaatgtggtttgaggcgatagtattcttactctataatgtacgaaaggagggggatgctcttgcctgaaacgataaattgtgtcgctttagatgatgtaataaatccgtatacggaagaggttcttatatctaggggagatgaatttattgcgttctacgtgaaaggggattcaaaggtatttgtagagaaggcgggaaaaacaatcgccattggattaaggtttataaagatattggggttgtaatatttattgttggaagtacataaagggtagaggttaataaggtattccatatttgaagaagcgggtttatcccgcttcttctgttttatttgggttcttttatatagtccagtaaatttgggggttcatcttcaagcagagtatctaacttctctaatatctttattttcatatcttgcgaaagatcttcttgttcatttaagaccgtctcttttacatgtcttctgatgttagattcaaggcgacttagtatataatcgatttctttcattctggtattcatttattttcaacaccctttaggtaatcccgtaattgcttcaaggtttttttgtgccaataagatatgttttgttcggattcttcaaatattcgacctatctctttgtgggtgtagccatattcgtaataaaaggttaaaattttacgctgcttctcagtcaatacattgattgcttccagtaaatcctcattgtctgcagggaaatttgtatttgttatgcggttaaaattgattgaaggttgtgatgtatcttggagaagtagagctagttcagtgtcggaagattcagatgccggcttattgagtattaattggtaacggtcttgtcttcgtcttacccttttgttgtagtccgtcgggtaacgttttataaacccggataaatagcggatggctctgttaatgcgataaaaggatttaaactgtttgtttagctggttaaggttatcatcagatggatcatttaatgcagtgtaaaaagtgtttttgtgcagagggtctttcaaaaactccaaaataactgggtttttaagaatcgattgtaggttgttttttaggtaaaggatatcttttaactgttgacagtctttttgttttcgacagtgagaaactgagtctttcatataaaaacctccttacctatatagtgaaagaagtctgcccaaactaaaaaataggaacatctgttcttattatacaatacttggatatataactgaaatgatattcatactataagtatttgttttttggggaagatgtgtcactggatagtataagagatcagttagacgaaatatctcggtttttatcaatatatgttaagaggattgtatttagacaggaacaaaaacggttaggggtgttgaaatggatacatcatttgagggggttatagctgcggtagggaattttggtttcccattagttctagctgtgtatcttttaatacggtttgaaaagagaatagagaatttgactgaggcaataaatcatttaaaagaggtcattaaaaagtagggtcatttaaagaggcggttgtctctttttttttattttgctgtcgataaaaagaactttggataattaagggtgtttgttaaaataaaggaagggtaaccaaatcatttcggggtggtggttgtttgtccaaattaatattgtctatagttctagttataaatttgttttatattttgaactacttatttgagattgtggatccgttcaatattttaagcggtgtttggttagctgttttcgtatttggggttatagtttctttagtgggtttgttcaggtataggagattatctggagttgggatctcccttgcattaggtgtcttagtcacggctataagttctttaggggtatatggattttattttttaatggcaacttaaacaaagaagaggggttaaccctcttcttttttattaacaaacgcttcctaagcggtttttagcgcattcgtaaccaaagtccgcaaccatgtaccaaccagggtctgatgttttgctagcgcatcggtaaagctccatatcgcacccgttatctccatgtccgaaattatcccagcaacggtcatgagcccggcagcaacggtctaaagcgttgataggggttccactaccacattttgcaccacaccatttatatctataaaacttaccagttcccgggtcaccaaagattaagcaaccatggtaccatgcttgtgtttttacttcattcccatcaatttcttgggctgggttcggaactttcaattgttctataaatttgtagtaatctgggttatatgcaaattctgattcgatttcggggtttccatctgctgacaccgtgctgcggactatgactttctcgccggattctttagtcactgtctggtgggttaatactcgaatattcccacatttttgtctaactgcttcaataatagcttcggaacccaaggttaaaaatagagcttcttttttaagctgatcttcttgttctgggaaaaagtaggtaaattcaaacgaatcctgttctggtgtttcgaacagttggtggttttttgctaattcttgtttcaaggtagtgaactcgctaaggttagatacctctttaattaaagcttctgtacgttgtttattgagtggtgtaatcgtgattcccatttgatcaatctcccttaattttttatggaggcggcgaccggattcgaaccggtgatcagggatttgcagtccgttgccttaccgcttggctacaccgccaaaaggcggggcgttaaccccggaaattagtagcagtcacaccggttaaaaaccatatctccttttggggtgattttatactctgctgggcatgtgctcccatagctgcagcatctgcggtcaggtcggcaaatgagttctgattgagccttaatgggtttatcattcaattttttgtccatatttgtatccctcctttatgctcctaatattaaaagtgacattggattcaaaaaactaaaaagaaaatgaaaatctttttaagttttataaagaactcatcactatttaaggtataaggaggagatgaggtatgtttgatgaatttattgtgtatataaatccggattgcaacccatgtaagatgttaaagagttggttagataaacaaggtattacatatgttgaaaaagatattattaatgacaagcaggcggctagagagttcatgagtatgggacttaatttcaccccatattcgcagataatagttaagggtattaaatatgatgtagttggggcggacgtaatgaagattacagatatattaaggttttcggatggtggaacagatgagtattgatgactgcattaagagggttcacagtataaaaaccgatttattaaaggcagctcaaagtattgaccagtgtaaatgtaatgaagatagggaaatgtatcaaaatgttactctttgctatgctaaagcacttaaagatttgaatgaggtaatggaggataagtacgggattcaggtatgtaaacaatgtagtaaataaaaacgttatagattaattgtaaaaaatatggtaaagtacagataaaccttctttaaagctgctgagagtgtggttgctggtcaacgcactctctaataatgaaatagtgcaaggactgtccttttggcagtccttttttctttgattgtgggggtcaatacaaaggaggcgattttggttagaatgtttacagaagcaaagcatttaatggatcgttaaaggagattatttatgaaattaaaaaagtccgatttatctaggtatattgagagtggaaaagaagggtatgtagctgatttaacatctatacgttctaggaatacttcctatttggggaatactttgagaagttattttcgtgaacagattcctaaatatacgggaattttttttggacgaagagggtgaggaggttttatcagagttaaatagacttattaaagatcgtaatattgataaagcaaaattggagttcccagtgtcctcggggtctaacctatatttagtacctgttggggaaaatttagatttggttgtaaatgtgtgtgatgagtattatggggacggggactatgcgaagtacgttggggttgaatcgatcatttttaatgacaacacaacggttaaagatttaggagaattaataaagatagttaaagatttgttatctaatataggttaacctgtgagatactttagttattaaaaaattagaggagtgtttgatttggatccgaaggaatttgaacaaagaatacttggtgaggaaattaacttggaggcagcagaaaaggatcgggatccagaagcgatattgatgttgttggaaagtatgccttacaaggaatcattaccccgtattgcaagtattattgaatcggatacagtgaataagaagggattgccgttttatttaaaagcgggagagtatagcggcaccacaatggatatagggtatgttgatttaacgatggaaaagtggcatcaaattgaatcagtattgtatttgttcaaccctaaattttatagattggaagaaaacagagtgacggaaataaaaaaagaagatatggtgggaaccattaaatttaaagaggggacagatgtggatgcaattatttaagatctggtcaaaaaagaaccggagggataatggatcttcccgagatcgtggcgttgaggatattgtagatgaaaaagaagaagacggtgggatgcagattcatgtaggtgcgggtggtttattggattctactcgtactgataaggaaacgtattatagggacatcaaaaatagtatgactcaggatacaataaaccgcattagggatattgcagttaagtctaaaaacaaaaatgatcttttcagcaaaatggaggatgcagggattcctctaaaatatttaattgcgctagatccggcaagctatgaggtggatgtacagtcatatcgtacacttaaagaaaaagggattgatgtcacaaaggtattaagcaataaagagatattggattttgacgagtcctatgctcgcgagattataagtatgaaggatccggttccagaattaaaaagagcggttagtgtcgacgataatagtgtagatgatattgaaaatattaattatgaagatatacaagaggatgtagaaagagaagaggaaattacaaatttacaaaagggcggaacagagttagatcatgtggatcataaagataatcaagaaatgtctgaggtggaagattcgttaagtgggggtatcgaaggggttagtgacgatactgaggcggttaatgtcggagatttagatgatagtgttgatcagaaaggtgagggtgaagagaacggggaaccactctggaaaaactatcttgaatccttaaaaaatgatattggaaatagtaatggggaagatgacaacgacatagaagttattgaggacgcagggattaaaaacagacaagtatttatcctatccaataaaattacagaggtggatgatatggatgggtatgagtttacgattattgaaaacattcaacaggttaatttgtataccacacataaggataatttgttggtgataactcaaaacattccagaaacccttcaaagaccattttttagttggctcacaggggttatagatgaaggtgagaggtatcggattgtaaccttaaacagttctccagtatctcataaattaattgaggatcggattgatttaacgaaagaaagtttggatgaatactatgaccgtagaaattccgatgattatataggggacggggctggagaattttttgatatttccaaggtgttaaatgggggtacatacgatgagtaatggtgtgaaaaacagtcgggcgtctattgtagatgattcagaaaaggttttgccgaatggttttagaagattgaagccacaagagaaagctgaccggaatcgtaaagtattgaatcttttcaatgaagctgtatcagatcaggttggggcacaagatatctttattgtagagggggaggttccagagtttcgagttaagggtgtgttgatgaaagtaaatcagttttatccttgggatcttgatgattttaattactttcttcgaaatgtttcgcagcagtatacaaaatcgagggatcgtcttgatgatacggttttagatactaagttttattcagcgttaatgagggataatgagaaaaaatacgattacagttttatgtttgggaaaaagacttttcggtgtcatgtattctccgcatcagcagctaatgatcgtagagaaaaagcggctattgtaattcgtgttattcctcacaacataccaaaaattctagatttaaatttacctaaagttgttgaaaaaatccctaagttccaaagtggattggttctagttagtggaagaacgaatgatggaaaaagcactactgtagcgtcaattgttaatgcaattaatttagatatggaacgacgtaaggttattgttacagtagaagatccaattgagtttcattacaagcaagcaaacgctaagattttgcagagacgggtaggagataatgttccgtcatttgctagggcgacggaggatatacttcgggaaggggtagatgttgcggttattggtgagcttcgtggtgaggaggagatgtataacgccttaaagttggcagagatgggcaaattggttatctcaacaattcatgcggattcagtagctgccactgttgaccggttcgtgggagagtttagtgcagatatccaatcaaatattcggtcaagattagttgaaaacttattggcaattgttcatcaaaacttagatatttataagggagaacaatatccaattgcatctgctttactaatttcagataaggaaatccgagataaacttcgggcggcacctacaagggatggaattaataaactattggaggaaggagatccaacatgggctgtaacccgggaggatgcgtataaagagcttctcgatcggggggttatcgatgatggtgcaagggatttatttctatccaaaacccgggtataacttgattttgaagataaattttggtaaatttatattatagtaacttccaaactctatataaattcgccaaagagtaggttccccgacctactcttttttctttttcaggtaaaaggaagaagtagtgtaaaccgaaagggggatataacaaccaattaacaaaaaaggaaagaacgataagactagatgtgcgacaatttttaataaacttaattactttctatagaggatgggagatactatgaagtttcaacacgcgaatgccggggatcaattgatggagtctttacagcagggaacaactttcggggatattcaggttttttctatattgtttttggttgtagcagttattttagcaatgacagtgttcatggcgccgaggtatagaactcaatttctttctgttgcttctacaggtatgatgttattactgggagctgtattcattttgtgattttgtactgtaacagttgaagattgatatacttccggtctttggccggcttttttggactctatactttacaaaataatatatttattgtataatttaattaataaaacacagaggtgaacaacatgttaccaacatccttcaaggctaaaattcaaaggttattaattaagaatggttttaaaaaatcatcaaaaacaaaagggagaatccggggtttagacaattacacggatgggtttgattttgagaaatcgtgggatgattactatctgttttacacctgtgggaatacgatctatagaggtatgtcacaaagagatcaagatcggaaaacagaaaaaatgtacgaatttcttgtggatcaaggattagaggatcatgtaaaactaacagggttgcgatcaaagaaggcaatcttattaaaaccataataagttaagtaactgtggggaaaggtgataatgtaatggataaacaagaagagttaatgttgttaggcgcactactttatgatgttaggttaaactgggcggatgagatagttagccgcttaaaggaagcgaaaaaattggcagcaaacaataaacttaaagatattgaagagaaaattgatgaggttctagagaaggaatatgagtatcagaaaaatccgtacaaaacaagttattttgacggcagggttttccgaggatattacgaagatctgctgggggatcaacagttagcgggtaaatcgattgagtttcaggcggtagtaagggatctttgtacttgtggagacggaatttttgaggattgggattaaaacctaataataacaagaattaaaacaatacaggagggaataaacatggacgaaagacgttgcttagaattaggatacatagagataggtacgatagggggagttaagtacatgggaaaggttacggatgaaggggatttattgtatgtacaggttgttgggggtcattcagttgggcatccggtaaccttgggaatggctgaaattgatatgttcaagcagttcatggaatcaagaggataaatatttaagggacaataaaacggttaacggaggaattgaagtgagtgtggatatggattttttaaaagaactcttaaaaaaagcaaaattagaaaatgaagattttattcaaataaacgtaaaggggtttgaaaagattctaggtgagttggaaaataaataggtataagaaaataaggtggtattatcattatccagatccatgttaacggttggcttttacataacgagagtggggggtacttatgaaagaacttaatttaaaccaatatgtttatgcgaagttaaatgaaaaagggaaacaaattattgaaaataaacacgatttggatagatttataggggacgatgaaggggtttataagtttcagatgtgggagttcatgaaaattttcggggtacatttaaaaatggggggatctgtcaccgaagataattgtatttattttagtgaggatggtcttaaatagagaatgattgtaaaagggatttaatgcactaggataacagtgtaagatattactgaggtagagtagacagttactgtctactttttatatttgaggatgtttaagaggaaaccaattggagggttaactgttggaagttgaaataatggatgtactcaaagaaagaggtatagaggtaacacgagatgttttgttgtttatttacggtgtaaagccagcgtgtgtgctttccagtaataaaagagggttggttcatgtatttcaatccgtttatccgaatataggggtacagagggtaccgaagaagtttattgatggtggtctaaaggttgtatcacgagagggtagagagtattttgattataatcatggagaattggggaaggttctgggttatccaccggaagcctgtgattggttttctaatttactgaggcggggggagttaaaaggtacagataaatgtgtaattgattatcatggtatgttatttgcttgtgcagtggatatggtggatgattgtttatcttgggtaaagaaaaacagaccggtaccggatgaaattaaaaccgaaatagttgtaaaaaagtatgttgatggggaatcgtgtattttacttcaggaatccggtaccgaataacgggtgtattgggtacgtgcggataaagaactcaaaaaatttaaaaaaggaatgtgataaagtagacaatgtaagttaattgtctactttctttatatcccgttgggttatgcggagtaccaatagcgagtaatgggatattttaatagtataagcaaaaaattaaacaaaatacggaggatcggttaagtgaagaagtttttagcaccaggtttgattgttgtggtactgggagctttcgggctgggtagtgcagcgcatgctgtgaaaacaaaagaagatgggtttaaggagttaaatcactgggagaccaataatgttgacgtcagtgtaattgttgatgagaaaaccaatatagagtacatagtaacggggagttcatcaaaaaacggtggaaatataactccacggttagataaggatggaaagccaattttatataaacaaaatggttcgaataactagaatacaaatctgaatatacaggtaggaggtagctttgtatgatgtggatattgggagttggcataggattcttagtggcagcggtaattgcacttgtggtggcgaaaaaggtgtttaaggtagataaattatctgtaaagtatttagtgggagttatggctgtaatgtcggtttgttgcgttctaatgtccagttttttcttcactagtgaggctagggagtataaggcgctggggttcctatggatgcttatgggggttctaatgattttggatacgcttcgtaggcttctggcgaaggtaaaagagaataagggatatggaaaaaacctatgatttaaaattggttgtttgatagttgtcgccaacacttggcgacttttttgttgcataatataatatataaaaaagaaatgaatataatgatgaatatagatattgattataaattacataaaatatgagcgagggtgttttaaatggttaatactgagagtgctagaaggctaccgacaaataaagataacgagtatgcgacaattcttggggttagctcaaaaaaattaagccatcaggtggttataaacgtatttaagtattcccgagagggtcaattaactgatgtgattgaatcagttgaagcaactgtaccgaagtacctggggagatccggggttcggtggtttttagagaaaaggcttgaagagtttgaaaataaaaataaactgggaatacgtttcgtggtgtgattactgtggagaaccgtcaggaacttattcaaaagttagataagtttaaattagcttcgggaagaagtctaaattgggatagtatgtcggatgaacaattaaagaaatttgcggatggtttggatagtgtttttatagacgttttttcaaatgatgatgaagatgatattgatggtattgatgatatataatgcattaagaaaaagactgttgaagtacatctcaacagtctttatttttattcgttatcatcttttttcattaaaccttcggagataaagaattctttcaaaatttcatttaccagcttggatcgtttaccattacgaccttggttcaaaccagttaagctgtctaaaacctgtttaacttttgggtcaaagtaaacggctgtgggtttaattgtttctgtttttccttcggataggatgttatctaagagtttacttcctgttttaacattattattgatattactattgttattatttttatcttcaatattattcttgttttcgatagtgtgattaatcttaggtgagtttgctggtcttccagcatcatatgatgtatccgcaaatgatgttaaacttctattttttcgtgccaactccaaaagcctcctcaaataaactgtaataggaatcgatcaatctattgctgcttttctctaccaatactgccggcagcttttcgtatgcaaccgagttagcagatcttatactcttagggattacagtgtcaaacatgtgtatacctttttcgtagcagtatcttctgcactcttgtaaaacttcggtgtgtacattagttcggctgtccaccaatgttccaacaactccagctatttgtaaccccgggttatgtccctctttaaagttctcaatctgttttaaaattttggttagtgacctcatagagtatacttctggttggaacgggataatgatttcatctgctacgtttaaaacgttacctaaaaccaaaccaaggttgggagggcagtcaattaaaatataatcgtatgactccttaaccttttcaacaatagtctttagtagtgctgtaggtgcgggatagaggtctttttgggtaatgacatctaattcaaaaaaccccatgtcgtcattactcggtaggatgtctattcctttataaacgtttataatcgcttcttgcggctcattatcacccaataaaacgtcatatagagtaatctcaaaactgtctgggttctgcccgaaggttattgatgagtttccctggttatctgtatcgataattaaaaccttcttattagattttgcaagtaacccagcaaatgatgtagtgattgttgttttgagtactcccccttatttgtggataccccgataactttagccatagtatacttcctccctaacattcattgatggcaatataggttaccatcttttgatattgttctatgtatcttttgaatatcctgtccagtttaaggatgatatttttaaggtcaggtattcaataggaacaaagaaaatattaacggaagaataaataaatatcaatagtgatgttacgatcaatgttaaattgaatatcgttgatacaattattttaagtatcaatatttaaaattaataacaatattgatattaataataaaaacattctttaggatcaataaataagaataaactggataagaagcttacaaaactgaatataaagattggttaagatagaagatgtaaacagataggaacaaatatatctaggtgaagaacaaaacatcattgacaattttatatataaactgtatagtaaaaatatcgaataaaacaaataaataaagccaaataaaaaaatactttgacattttgatataagtattgtataattaaattacaaacaacggatgaacaaataaggaggaaatacaaaatggctaaacaaaaaagattaaactatgaattggttggagtgctttatactaacgggtatacaacaaaggatattgctgaaatgttcaactcagttaatggacatatttcaaaagttcttagagcatctggagtggcgacacgtaagcggggagaagttgttgaaaagttgccttttgattgtttctctcctgaagataaaaaagtagtattaaacagcgaaatgaaggatatgttaagtagctatttaaatatcaaggaagaaaaagaaatagttccggaagtaccttttattgaattatccctagaagataaagcaaaacagattcaagcgttgcaggatcgtgggttatctcaacgtggaattgcaagagaattgggtattgctcaatctagtgtgtctaaaacaatgaaaaagtatcggtcatcagttgcacaataagcgcctactcttgggcgcttatttaatttaagtgggatgattgtgcccgctctgttttttgttgttcaattaagtacactgtaggtagagatttttgaaaggaagatttaaatggctcacctaaagtataaggatcttgttaagtttttaattgaggatgaggatcagaagatatatctaaaggagcttgccgattaccgaaaaggagatattcgaacatatattaaacgggggattttttgtgtacccgcacttgatgagttggattatattttaaagaagctggatttaacaatagaggatttgggtttaagtgaagaaacagcttctatgttagaccgaggttttattatccctgtctggggatccagattgaagccgctatttctaattaactatagttggcttagggataaatcgaaaaagtatataaatgtgtatccggctgaaaatagagagtatatcaagaagatgaaactttacggggcacacaatttaaagcagggtttaattgaagaccggatgtttgttgtagagggggcttttgacgtattaaggttggagcaatacggaataccggcatcatgtatattgggaacaaaaacaatgccttatcacaaacatttttatgctagatttactcgggttatttttgtaagcgacgaggatggttctggggatgcagcgtatcgacaatttaaaaaagacattccccatgccgagaggttacgtattactgggagggctaatgacgttgatgagtttgggggcagtaatacacgggagtttcaggagtggattgagtacgcgaaaacacttggggtaaagaataggaacttaaattgacaattttatttataaatagtataataaatttaataataaagtaaggaggaattactttgaagagtgaaattttaatgaaagtggtcaattccggtaagctcccggtagttagggtaactgatggaattgtggagcatttccaagaaggtttagacccgggaatgttggtaaaggttaaaggggtaactactactgatgatggtgaaatagaaattttattagacttagagccttttattgatcacaataaatcagttgcaaatccgaatttttataacagcaagggggaggctgtcctcacttggtttgaaacaaatttttatccagatagcgggatttatttgattggttttttggaagatgccgacttaccatttgagttcactgaaaataactcgctactaaatgagtatgtggcggagggttcggataaagggtatgttgagtggttagaggatagagttcagatgttagagggaaataaataaaggagaataggaatgggaaactggagaatagttaatgtacgggggttaattgaagacaaacatgaggttgatgctgcgattcgttatcttactgtaaatgaagatacatacaaatcagaggcattaactgacaatgtgttttttcttcaatttagtggacttaattcaatagcggggctaaatcagtggattcaaaatacaggggttatatggtcaaatggggttgtttttgaacgtgattgcactttgagtgacttacataatgaattagtggtgttagctaaaaagtttctgagtctgtcaatggtactgaatgctgggggagaagacggatcattggattgtgtaaaaacgttctttgtaaagaagggaacggttataagtatggatcccattatttcaaaaattaagcccaaggaaaaatatccatcgttttctgatttactagagactataagttaagcagttagtctgaaatggtttggggtgttagtataaaaatttgggataatacaaaatacagtctcaggattatttaaagatagaacaataggaggtccgtatgaggaaagcagtgtcagcgttattgagtgtttcggtattgtcgttaagtatggtttcaggtgtaggaaaggcgcatgcagctgaaggtgacgtaattaatgaaaaatggggaaagccggtatttgtatatggtgaagctttaactactcaacaaaaattaaagacattagatctattaaaatcccaagaggataatgtaaagtcggttagtgtcaacggtaaagatttagtgaagtacttgggtgaaggggatccaagttctaaaatgtattcttctgcacttattgaaagaactgacaaaggatcgggagttaaggtgagtattgttaccgaggagaacatcacagaggtaacagaaaaccaatatgcaaatgcaatgattacggcgggagtaagtgatgcggatgtaaaggtagcatccccaataaaagttacaggagaatccgctttaactggtatctataaagcttatgaggcggaaggtgaaacattagataaagatcgtatggaagcggctcaaaatgagttggatgtcacaacacgaatagctggtgagaataaagataataaggacttcaacactgagcagctaaaccaggcattgattgatataaaaagtgaattggcgaagttaaaagaagatcaagacaagctggcgacaccagagcaaattgaaaaaatcgtgaatgatgctttaaaagacaatgatctggacggggttattacaaatgatcaggtaagtcagttagttgatatggctaacaaatatcaaaacacaaaagctattgactctgctgaggtaaaaaaacagttgaacgatttagctgatcaagttaaggataagttgtcaaaactgaaagataaagctgaggagactgggttctttcaaaaaattggtgatgcaattatgagtttgttttcggctatagctgggttattcagttaaagaaggtgttggtgatgggttgcgaattttgcagccttttcatttgttttcggttagattttttataagagaataggagttggataagagtgggtttagatgtggggtttcttatagatgattcagataagagaatagaagatttaaagagtaatatgatggaggttaggggttctgtagaacgtttggatcagtgtaccaaaagattttacttttcaacaaaaattatgtcagattttttggcagtaattgatgtgtttgatcgcaataataagcaattaaggattcgtgtgtatgtaaagaatacaaacatacaaggaagcggagaattgaaatgggttaaggtaagtaaggactccaacatgtgggcggtttcggtacatagtaacagttgggaaaaagcaaaaaaagaaattatgaattttgtaaaagaagagttatttcaagcaagggcggtatagagagtagacatgattaaggataaagatattatggggtatttaagatatttaggtgtcggttcttttttggatactaaaaaatttcaaaaccattttaaattatctgaatatagcgctgtaagtattgttgatcaattaatcaaaaaagggtatttgtccgaatatgcgtatgcttggggtgtacgtaagattatgaaaacagaatattgtgagtaaaatccgcttcggcgggttttttatttggttaaaaagagggtgggaaaaaagaatgaagatggaaaggtgtaaataattagggaggagttgatatatttgcctgccatagatagagaggaagagcggttaaattcaatattgtgtgaagtaaagtcagaaatgaataagtttctattaaaaaattacggaataaggttagatattccggtaaaagttagctctagattagttgtaagggtggcaaagtttgagtatatgtatgtttccaatgggagagataaaagatctataccaggaacagaacaaattaaaattcaaaaattatttttacttcgagaaagtaaacagaaaatcctgcgggtagcttttcatgaagctgtacactatgcctgttatgttaaggggattccgcatagggacggtaatgttgaatttgaaaaagagctgcagaggcatggactacctagtgagtcagtaacaattaattttgaggatgaattacttaaaaacagatatcaatatttatatgtatgccaacaatgtaatggagtagtaaaacgaaactttggtaaaccaaaaaagatgctggcggggtctgttaaaacgacatgttgtaaggcaccggtcaaatacttggggaaagttccttggttagaggcagagaggttatgtgagagaacactaaaaagaagaaagggtgggaattaaaatgtatgtaagtaaacaacgaaagccagatgatcaggatatgtatgatattgtagatgaattaatggaggggctagggaaaacggctaaggacaatgagatttttgctgtacgggaggttactgctgggggttagtgagggaaaaaattgatcgagttgagggtgtatctcggggggacttaggtgttgagagtcatttaagaccgatgtataacaaggattcttatgtaatgaaatcatataatgggtcagttggtgtggttgctgatgttgtttcaaattttagggggtcgctgagtgtgcagatagccataaatgttaattgggaacaatctgacggtgatgatgattttaacgaagcgttttcagaatttcttgaggagattgaccaaaagttggagacagaaaagattaaggaatatgggaaggggtttgttcttttatctggtaaggatgaagtttccaaagtaatagcattacataaagttcattcagttgatcaacagagcaaaggtatacatccagttgatagttttttcgaaggatttatttcaagtataaagtcaaaagaggatttaatccgggttcagagaataaacgaaaggttaatggtgtttttggagtcaaataagagtttaccgaggaaggtagaaaaacttaaagggggattgttggggttaagaatcacgcagaaaagtcatgtaatattggtgacagctacaaaggcagctatttatgattccagatctaataagttgattgaaatttacgatacgctgcggaaacattctctggtcgaggcagagaagaatgttaaaaagttaaaaataaatcttttgattccatttatacggataatggatttcagaagaaatattcaggaaagggatgcttaaaaattgccggttacaagatttcagtttgagatgagtggtttatatgaaatgctgcggtcaaagctgaatgagtattatcaaattggtgatgtggttattgaggatctgaagtttcaattgaggctactgggggttaaaaaatggagaagtgttgtagtcgacattgtgcccggggaggttaaggtttacaaagaagatcggagcgatccccgcgattatatggtacatcgttggggagataattacgatatgtgtgcaggtcgtgtaaactgtgatgattatgatgagcatcttttttggcagcatatagggggacgaatggtactggcagtctctcaaattgaaggacgggagttaaattatataacagaggatattgttgagagagatacccgtgtatcaaaaactgagtatatgtcagtaatgaagggattagaaaggctaagagactcagtgaataagtttctgggtatgaacatgagtatttctccatcagggtattttacggctaaacactataatacgggtatagcggcggaggtacatactgatgactttacagtgttggtaatgattggggtcggagatatatctgttttgaatctgaataatagaggaacaggtaatcgagttgaggatagggtgttgagtatgattcgagaaattgtgaggaaccggtcgtattctagggtatttgatcatgaaattagggggtatgtttatgtataagagcgggcaaccgctctttttttgtaggataatcctttttggctgaaaccaaaaaatatataaagattatatgtctaggaaaggagtcagccatgaccaaaaatattgtgaggggtcttttagtcttgtctgcagtatctgtattgcttagtgcatgtgaatcagatgaggaaaaggcaattagagaggctaaaggaaaatttaaggtattgtacacatatgatgaggatcaaactagaccaatagttgagaagaaaaagactgtggaagagttggcgcaggacattatgttaaaagatgttggtttggatactggaatagttacgtttaagaaaaagggagtagcaaaaaaccaaggtgtgtttattgagtctgccattagggatggcgacaaaattccgaaagtgtctgcaatgtcgaaagaggatgcggataaattaaaggtagacaacggtgatgaatttgctgaagagaagaaaaaagagtttgcaaatcttcaaaagcaaaggaagaaagtattaaaggatcagtataaagatgatagtaaagaggaaaaggaactggagcaagagttaaagaaagcggttgaagatcaaaatgaaaaagtggagaaaaatagtgactagagggtggaagatcggatgaacgagacaagttttaagggtgtgttaagtagtgatataaaaaatctgttggatcgtacatttccacatttgttagtcgaaaataatacacaaatcaattgggaagagggtggtcagtatgaattgagtttgtatcatgggcagctacttccgtttattgtaacaagtgcattcgccttaattgatgtagtcagaattgaagatggtcagaagaaaaaattaggacgtgttaaatacggtgtgattttagaagacaatgacccaatacatagaagattgttagggttgcctaaagacttagcggaggaatcgggggagttacaccggttatgggagatgcaaattagggatcgaatagatcgatttggttacggggagttggtttccggatgtatttttgtatcccagggatctaaaccaatacctactaaagatgaagtactgaaaaggtttgaggatcggttagtagaagaagtggatggtttttttgtggctttaatggggaaggagacgtttcatccgggacagtatttggttcaatattcaactattgaagcggggtttgaaaagagttggaaggtgttagtggcggttgatgttatcagccgaagaatgaagagcaaaaagaaaattgagataatgatagatacagggttgggggaaaatgttatagagcctagtttagaagagtatagaactgtagctaagaaagtactaattaattttgaaaagagtacaaggtcagtaaagctgggtaaggttgaattttcgtttaaaggacggccatctgctccacattaccttgaaaagataaggggagacaaagaggatactgaaaaactgtttggaagaattaaaaagatatttgaaatggatgaaaataaaaaacatatacggggcagggaattgatagcacctggggtgttgaaagtcacgttaaccccaaatattcctttatttcttggtgcttatggaattgctgcgggggatggtgaggttttgtatcggaagggtgaacagagtctacaagaggggttagtaggcttaggtaaatacgctggaacgaaaaaaatcttattggatatcatgaggtgttatgactatcgtaagggtgtgaattgatttgaggttaaggggatttcattggggatttttaagagcattatcgaatacggtaaaatccagtgctatatttgctcaattgtacgctagaaaagaaactgtggctaaggggaggctaataacggcgggggtgatattgggaacaactttgattaatgctttctcgtatgtagcgcagtcagtaactagggggtcgtcacgacgaggtgggaacagtaggaaaaccagaggaaagtcaaaaaacggaggttatttcgatcaagacggttggggaaagggaagaagaattgaacgagatttaaatgattttgaagagcaagaaccagtaaaagcagacaaggttaaggataaaataatcggcggtacacaaacgggagataaaaaacctattcatgggaggtggaagacatggttagggtctggtgaggaagctgttttagaggaagatgagtttttaaaagttcaggaacgtgtactgggtgtgtgtcagaagtttaatttgcggtacgagtgggttggggaaatgaagatgatgtgggtatttgtcgatggaaaagccataaaaataaatcagagcgggatatataacatggtggatggtgtatactacattccggataacatgtctaaatcggcggggctgacaaggtttttagttgatttttcacatgagagaacgtatgtgttaatgggtctgattatggcgtttcataaaacaatatatccttatcgggaatacaatgatcctgcctataaagtaaacgatgcggtataggggtacaataggtaatattaatgatgaaattaatagggatattaatagggatattaatattataactataagcggatatctccgctttttgttttgataagcaatctataaatcaggaagtaaatagatggtagagtaaagaaaattaactaaggagatgcaaacatgttagaagctaaactaaacaatgataaatcagatgataaacaaacaaattcagaggttaagtcgtctaaagaagttcatgacatttttgatgggctagtaagaggttcatgggtagaggttaatccggttccagagggaggggagacttattactctattggggcttacagagatggggttagagttttgtataaacctactaatacagggttaacgggtacggttaaagaagcattgagacttgatgggttgggttatgactttgttgtgattttcaatatgtatcgtggggatattgttgagaagtatttggtgtaactgtctaggtaaagtaaaggcgaattgaaaaagtacgaaaggtaaaacacggctaaaatattaaatggaggagtttatttggggattgggaatgaattaatcgtgggggatacaggtacaggtaaaacgagaatgttggttgagatgatcaagcaggtaaaagatcaaaaggtaatcgttgttgatgggatcatgagggagatatttgatcaaaatgatttttcgaggaaccaaaacattgtcgattactttagggatgttcctattactggtacatataatcggctatttaaaaatatgttgagagatttcagaaacggttattttaatgatgtggatgcggtttttattgatgacgggtacttacacttatacacaaccggatcaagtaagttaaaggaagaagctgtagagtttattgaaagtattgtacataagggcattaggttagttattgcgacacaaaaaaatcctaaacagggtaagtataaagatttgtttgaggaatttaaagtgagtaaagcgtgtttagcggcttgctaacattaaaggggagttaaacatggattttaatcctaaaatgactgataatgagagtaaattatttaataaaatttaccggatgcagaggaaacatattttcacgaaaaactttggtgatggggagatctccaaagttactagaaaaaatgacttatctggactctaagtttactttgattcgaatattgatggtcaaataaagattgatgggttggagtttttggaggatgttttagaagtaaaggattgacttcgtatagataaggaggattatgatggggggtacaggcaattaaaataaatgatatagaagaagtagtaattgatgaccgagtgttaattatgtccaccagtagtcagcatttaaatggtaaagagggtaggattaaacaaattaatgttgggaagtttggagcggagttgttcattggtttagatgatggggaaagtacttggatcgatgtagatgatgtcattctaattaattaggaagataacttggtagaataaatctggtggtgataacagtgagtgttttgagcgaaatgcaaaatatcatcaaaaaattaaatgtacattctgatagaggtattgggttagcttatgctttaggtatagaccgaggcgttaaaaagctaacagaggtattgggtgtgggagattccgtaaaggtgataaactccatcagggatttagctgacaggcagtttaatattgctcaagatcatgaggaattgggatctcccgattcagttactaaaagagccaaagctgagtatgaagtttacgaggaatttattgatcagttccaatcgtggttaaagacacaggacttcgatacagtggttactcatagtgtttctgagagtatcatgttaacggaatcgggaaaatgtcacttttggggtaactggggagatttagtggctaggatgttatttgaccctttagtaacacctaaaatatacagtgtttctgaatcgagaggaaaggttacgaaagtgattgttgacttaaatggtttaaagcagccgtttacatctgaggagtttagagaatacttttgtatttacgataaggaatacagcatctgaaggaaattattttaggtgaggcgagcttaggctcgtcttttttgatatcagtatctaggacaaaaataacaaaaataggtagactagtagtaaataagttggggagggttgattatgagtaggttagatttaaagaaaataggctatgtcaaaaaattcattgttgtaaacaaagcggggtcttacttaaaagagggagggacaattaaactatttaatacaaaaattgaagcggacaaagaaattgaatccagcttgagtacccctgaatgggtggcgatacccgtgaaatccgaggtggttaaggtggatcaacaggatcggaagtgcccggagagggtctatggatactcaataagtctaggtgatacatatttaactgatgaagatggtggattagttgtgtcttggacactgtctgaggcgttaaggtctatggaggaagcagtaaataaagttatgactaacagaaacaggttgcctttagatcctccgaatatggtgttggttgtggtggataaggttgagctgatgggggatattaattcgtgataaactaatgttgcagctgagagggagatggtgaaatggttcaaaaagttccaagggagttttacattgaacttacaaatgaaaagaagcggttaacggagcaatttccgtctgattcgatggagaaaattaatataaagttgattgaatggtttatacaggaacgggatatcaacccagctttacagggggttagagtttttgtttttgttgactgtttaaaatatggctgcgaacctcaaatataaaatggtgggtggtggaattatggaagatttaattcattttaaaaactcagtaaagggactatctgaggtgggtttaaacagggtactggatgatatcaaaatgagaattggagaggcttatttatctaatcatggggcgtatttaaagcagcagaagaggagagcagatattgtgctgcaggagttagaaactcggtcaaataaatatcgaaataatgggggttagggattgtttgtaagagcgtgggatggagtggggatgtattccccaattttatctttttctgaaacagggaaaatgttggtgtttagaaatagagatgagtttattcaaggtatagatgtaaatgatccagttatgttggactccggatgcaaggataaggcgggaaacattctttttgaagaggatatagtcaagtacccgaatccgtttgatggtggatattatgtaggtgtggttaagaggatttcaactatgtttacgattgagtttgtaggtaagggttgttcacaagcatgggatcgatacgaaaaggtaggaaatacatatcagaataacgatctattggaaattttatagtgattagatttacaaaggttaaagattgtgatattgtcgcttggataacaacacttatccgctcgaaagttagatgtggtaaattaataatgtgccaaggagcacagactctagattaagtaaataaagggcaaaccggaagcgacaagtcgtttaggtagacccgatcatgaggaggaaatcaataatgagtcgtattagttttagtggagcacgtacaggtcgtagaggaaatggtggtggatttgaaggaatccaatcactaaaattcgatattggggagaaaaaacgtttaattttcccaacatttacagaggaagatggttctaccggtttgttaatgtttgcggaaccataccatccgattacagcaggatttgtttccttagtatcgagcaaagggaataaatggtcaccatataaaattagatgtatgcatccattttcacaaacagatccaaatgtggcacgggacgttgcgtcaaaaaaacaaagatgcccgttttgcgagttagcttcaatggagtttaagcatacatatgctgaaatggaggaacgttatggggatgagttctctgaattagataaaaaagaccaaaaagcgttctatgaagaaatggatggtatgcataaagtttctgcttcttattataaaaaagaagatgctgaaggaaattcatataatgttacaacattagatatctttgttttagcgttggagttgaaattaacgaaagagacgggcaagggtggacgtacgaaatgggttcctattttagatgatgagacgggcttacctaagtatgatcctattttggtgccgatgtcacctgcgcgtttaaataaatttaagaatgctgcggatgctgcgtttaacagtgagactttagattatgagaaacacgcacatccgtttatcgagaacgaaggaactgaggatgaggaagaggtattggttggttgggtagacttttctgttatctttccacaatctgaacataaaatgcaatctggaaaagaaatgacggttactgctatgaatccggcattgtctgtagtaagtgacgagcttattaaagaagttcatgcgaaggcaaaagatctaaaagagaaagcgaaaaaagcgtttgaagcaacaaacgtagcacttcgaccatttacaccagaggaagctatcaatatgatggctgatcagggagagtattacgagcaaatgcttgaggagtttggaaatcctgaagaggatgacaagtactgggaagatgtatttgcaaagattctgaatgggtcaaaggcgactagtgcagacgattccgattcagaggaagatgaagacgatgaagaggaatccaagccacgtaaaaagtctaaaaaggaaaataaaaaatcagtcaagaaatcatccaagaagccagctaagaaggcagtcgtagaagatgacgaggatgaggacgaggaagattttgagttagactttgacgatgaagatgaggaagaagaaaaacctaaaaaggtaattaagaaaaaacctaaaacttcttcgaaaagcgataaaccaagaaagaaaaagcttggttcaaaagcaaaaaagaaagtagaagagtcggaagacatggaagaagatgagttgggtgaggaaatttttaatgcttaattagtggtgtgggatatcgaattttcgatatcccatatttttttaattttattctttacaaattcatttatattatgtataataaaattaacaaataaaaaaggaaagagttgaagtaattaaccaaattagaaggtttgataagctaatgcagaatttagtaatttggaagtgttagactttactagaaaataagttgaaaaggggaacaccttataagaatagttacatagtttaggatgtatttagcaggggagtaaattttggtaaagggattaataatttagtcgatatgaatgaggtaggttagtgtattaggaactgacattgaaattgtgataggaaaaagtaagggaaagaaatttaagttacgtaaatatgaggaggatattaatttatgtctaaagttactacaggaattttgagtgcaaagggattaactattgggggaattgcagcggttacagtagcagcaggtgttacgacgggtgtagtattacataacaaacataatggtgataacgataaaaatgtaccggcatcacaaacacaggacgaaaacaatacatcagatgtagtagggtcgaaagacaaaaaatcaaaagattcaaaggatgtacatgaggatttagttgaaagagcgatcgaaaatgaaaaaaagactgaggtagctcaggcggtaggtgatatagcaaattcaggttttgatcagcatgatacattggtagcaaaagcggttactggtgatcaaacgattgcatcaattcttaaagacactgagacaaccaaaattggcgataaacaactggtggccattgtgggtgaagatacaaagtctattttagatacacaaacacctatcgctgatgcgggagacacaaataaaggaaagatcggtgataatatcaatgtaattcctacggataatagagggggaaattcatcttcaccgacacaggttcctaatacaccttctgatggcgttaaggatgatcaaggggaggtaatgtaccggggactgacaacgggacagatccgacgattcctactaacccaacaaaccctagtgatggaggggcagtggatccaacaacacccgggggtggggatgttactccaacaaatccaacaacacctggagatggtggaacaacaccgacaaaccctagtgatggtggtggaacaacaccgacaaatccaacaaaccctgatgggggaggtactaatccaacaaatcctagtgatggtggaggtacagaaccaacacaacctgggggcggtggaacaacaccaacgaatccgggagacgggggtacaactaaaccgacaaatccggatgacggcactacaacaccaacgaatccgacaaatccaacaaatccgggtgatggtggaagtacaaaacctgttgaggacttggctattaaagctgcagtagaaaatgcagaagcaaaacaaaaggctgcagatgagaaatatcttgaactgacaggggcattaaaagatgtaactaacatcactaagtcagccatgtttgagtccgatcatcttacagagttaatgggtgagtacggaaaaacatttgaggaagcgtttaaagcaaaatcgcagttggatgaactccttcaaaagtttaataacggtactatgattgatgaagaaagacttcaatataatgaacagtttaaggttgtacagaattataaaattcaattagaagataagcttgaagcgttcaacaaagcaatggatcagtacaatggaaataataaagcaaacattgataaaattcgatctttggttgataaggttcacagcacgaatactgaatatcaggctgctgtagatgatcttaataaagcatataaagacgctaaaactaaggacgttgacgggaaatatagtgaccgtctaagtaaagtagctaagagtgtggaagacaacaatttttatcgtgatgacttaaatgatcaatcaaactctttggatgctgacgttaaagcgaaagatcgtgaggactactataagcaggagtttacgagatggtcaggaatttctcatgatatggctgcggatttaaataacggggttaaggatgtagatggaagcaatccattagattctatgccaattagtattaatgaggatggaacaactgttaatcaagatccagaaaatccgtataaggatcctgaatggtcagtttcaaaagaccaggtaactgaggctattatggttgctacaaaatatcaagatgaggcgttaaatcttcttgaaaatcttgaagataaagccaatgctgcaattaaagatattgaggggaataaagaagaatatgatgctgtacaaagtgaatatgataagcagtatcaagaatatctcaatttaaaagcgcaggcggatagttattacaactatgcacagcagttagcaagtaaatccgatgttacagaagaggatgctgcagcgtataaagaggcagtacaaaactttaaagatactagagaaaaaatcaatactcaattagaggctgtaaaagaagccaaggataaaacttacgatgcgtatgcaaaagccaataatgaaaataatgaggcattggattcaacttcgaccgttgttcaagatgcatatgataaattggatgatgcagatgcggctatagacaaggtaagtcgtcgtgatggtcaggatgtttataaagctgatcttgacgagaaaaaagaagatattcaaaaaacgcgagaagaattatctgaaaaagaggctccggcagttaaagttgaggataaatacgaagaaacaaacaaagcaattggtgataaatactatcaaaataaagatcaggttgaaaaggctgagacttcggataaagctgacttagatcaaaaagaatccaatttaaaatctgaaattgaggttacaaaacctgccgaaagcacacaacctgaagagggtgcgggttccgggtctgaaacgacaggaacggatgtatccggaagtggatcgacggatagtaaaccagatggtgaaactcaaaaagtaaataatcaagatacaactcaaaaagaaagtagtgatgttacagaaaacagcactacagaacagggtcaaagtgattctactaaaaatgttgtggacaacagtgagtcgcaagagtctgcagcacaaaccgaatcagctacagaatagggtttgctgttaagtgtagggtactaggataggcactttaaagagcaccgcactttttataggtgtcggtgttctttagtgtaaatagggttaagagattacagtcgggaggatttaggatggtaaagacgagtaaaacagggagtgtacaaattgagtttgttgataataatacggtaagaacgattattactcggcaggattcaatgagtataagggataaacagagggtgtttggaaaactggtttattttacaccaatcagtgaaaaagaggatgcacgcagtagagtctctaaagtcttgtactataaattaaacaggaatgaaatgattctcgatgattatcgcttaatggatcgtgtgactgaagatgaggatattcaagcaaggaatataatgatttcaggactggttcaattatttttgcttatttcggaaggaaaggtgtatgatgttgaaatcaacccgcttaactttgtgtatgataaaaacaatagcaggatttcagcattttacaggaaagatagagcgttagcagagattacggacaagtggctaaatgatgttaaaaagctgttaacatatttccttgtattagatagtggggtagttgctgaggattttgaaaatttaacggttgaagagctgttagatgcactacctgaatcaatctccaataaatttagaaaattattggactctaattcaatttcagatatggcgaaaatatgtttatctgattcggagtttagaagacttctcaatttcccgcccatttttgaagaggcgtacaagccaaaagatgtaacaacagcttctaggatggttccagttgattatacggatatgagaaatcaaagagattctgcaacggagaaaaaagcgaaaaaacccaagaatagagatgcagggaatactggatttaaaaataaagcaattataggggcgtctgtgtgcctctctctggttgttggtcttgttgggggaaaagttctttttggtggaggtaatgtagacttgtctcagcctgtgtacgataaaaacatccagagtgggttgatgaatgcttccatacaaaagtatgacgaggcttccagcaattttgatgaatatttaaaggaagataagaagcaagagttagatgaggatttgaagctgtctatgtatttctcttatcttcttaatgacgaatatgacaaggcgcttgatgtagatcccgggggagctgaaggtgtggtgtcctacctcaaagcaaagaagaaaattaacgaggttagcggtatcaaagcagacttgccggcaattaactttgaaaaagctgtactggatcaagactatgagcaaattgttaagttaaaagataaggtaaaggatacggaagataggcagactagtgtggttgaggcgttagtaaaaacggataatcttgatgctgcattaaagtatgtgaaggctaaaaatattacaggtttaaagaaagcaattgaggattggtcgaatgaaacaattgagaagggttcaggaacaaaagaacagaagaagaatctaaaagaagatgcagataaaaaaatcaaaagtgaattagacaattaataatgcctgacggttttctgtcaggtttttgtataagggggataacgtatgggtgaagttaagaaggatgatgagttatttcagcttctagttagtatgcatgagatacttgggaaaattaataaaataattgatggtgtaggggaaaaggttcaaggaaaaaatgacgagctgaatgatttagatcatattctagagttaaaagatttaaccgacgatcaaatgttggcagtcattaaagaaagaaaagaagttcggaaaagaagaagggtatttaaaaatataaagcatatggttaatttgctcggagataaaaatattgatttggagggggtatataagggattaggtgagaagttaattgaattagagaaaacagtatgtgaagataatcgaagctataatatgcgtacagatcgaataactaagaggtttactgaaataacaaacaagtacatacatgataggagaataagtacaggattgcctttggaggatatgccggataagcctgacaaggtaagctgggtggagagtccggagatgcttacaaaaacattggcgggggttacaaatcaaaggaaaacgcctttaaccggtatagactttgagaagaaaataaaaatggtggttaattaggttggtgatgtgtagtggactggggtaatggcaggggtaataatgtttcagatcgagaccgacttgaattagatgatagaggacgaacaaggcaagacaatacaggaaggcagcaaaatcactctggggtacataattactctcggggtcagggagatccggttcaggtaaattaaagttggcactttttatattgatggttggcggtatactttatatattcaacatgtcagggaaattggatttaaaatcatttttacgtacttttaatagcactcccgaggaaaacatggcagctatgacacgggggatagagcatttagatagggcaaataagcgtgatggagatccggaagacccggtgtatgataaaaataatatttattctgacaaagacattttaaaaatggtggataaagagtatatagtttatgtgtatacaagaaatatagaggtggataagaaatttaacagttgggttaaaaataatcaggatgatatcccagtatataaacttgatattaattcggtagagtacaatggtgagataaggaaatatattgatggggataagcctatgttattaatctttaatgaagttactcgggaggagaaggttctggatagcgtggttaaggatccgtcattattgaaaaatgtaaaaccacatattcagaaacttattggtgataaagaaaagagggggtaacctctcttttttatttgcgaagaagggatataaatacgcactggattatatttataagaagataataaaagggttagaggtgttaatgttgccgggtaattttaaggaattggtacaggaaacgggcgctgaattggtgtgggttgcgggatggaatcgtgaggataatggggaaattcaggcaatggtgtggtatttgaggtctggttcgactctcttggaaaagagtacctgtgtggggataaatcagttcgaggaaagagatggggaagttgctcagattgacggggtaaaagtatacattggtgctaaccatagagaaagagtgttaaaggacattaaaaaagctgtaacccggaacaagatttgtggggacagagtgaagcttagtaacaagtataaaagtgggggatccactatagatccaaacgtacaaaatacaaggttaaggagattaaaaattattctagataggttagcagggttaagtaaagtaagttataagtatgacaggggttttcgggagtttcatgttcggtctttagggggagttacatattattttggcgttaattatgtattcagggtttctaatgggcgggagtatcttcttggtgagtttacaccaagagggaaaagtgtacgaacgttaatgaaagaagtacagaaagataaggactcaaatttatgggttagtttgctgcgtgcttatgatttgcggaggaaagagggattgggttgagagaagcttttttagataacagagtagctaaagagctgcaatttttagagaagattttattggaagtggttaaggatgttgaggttgtttctaaattgtatcaattagaggttatgaatggtcgtggaaatggtgtaaacaaaaaattcctaaatgcggtatggggtatgttttcgaggatacagagaatagctgaaaaaaccccatataaccttatttgcagaacaagtaaggatatgcatgattatttatttccctacagggggagagggtttgtaaggttaatggttaaaaaggattttagacgtattgttttgtatacggatagtggaaatcttttatccataaaggagtttaaaggaggggtggtggttgtagaccgagagaagttccaaaaaatacacttagtgggtgttattgaagagcgttggaagaggtatgctaaagcaaaaaaggtaatttagcccttgaatgcagacaaataggatcacttgttcggtttagataataaaaaaagtgaagatagatcagaaagagcgatagaatgagatgacaaaatgatgataaccatgtaaactaacagtagatgaagaactactgttgggtttataagtgaatggtaaggtgtccgtgtggtgacgggcaccttttttctgttttgatacataacttgaatttgggattccctaattgtgataagataattaaaggaattaaaccggagggatatgtatggagacaggaagaatgagactgaaaacgctacttattgaaaatttccagtcgattaaaaaattaaagctctctttcaatgaatttggagttttccatttaaatggtgcaaataatataggaaaaagtgcaattttaaaagcaattaaaatattgtttacaaatgtttcgaatcagcagtacaaagattttatacgggatgggaaaacatttttcagggtgacaatggaggattatgatggaaataaagtgacgctttcccggggatctgttgattactatgagtgggttatagatggggcaaaaggtagagcagacaaaacaggaggaaaagtgccggttatagttgaggattattttaacctctatcacgagaaggaaaaaaccaaagagatattaaatattagacttccaagaagtacaatgccatttgctgaaacaacacctggagacaactattatattctacagaaagcattaggtactgaggaatatttactgggtataaaaaagactgaaaaagaaaaacgggatgttgtaaaggatatatcactcattgaaaaatatgaggaagaggaatcccggcaattaacagatgtaaatgggaagcttgctaggaaaaagagggaacttaaagaggtaagcaggtatgaggaagtattaattgctgagtatgaggtactggggttaattaacgatgttctaagtttaagggatgaaatcgaagagtcgaataaggttctaagggagaggcgtaaggcaatacaggatattgatatgaaaggcatagaggaggaaatacaaacaatcgaagccatagagaatatcgagaatctaggtattgagattacaaagttatctaggcagaaaaaggagattgatagtagactagctggggctgagattgaggatattagaggtgatatagatggattatctctaatggaagattgtttatctgaaatgcagttggttataaaaatgtctaaggaatataacaatacaaaaaagcggttagagggtattgaaaaagaaatggatgagctgcgggaagatatgggtctttgtccgatttgcggatcggatttaagtaaggttcatgtgcatgcataggttgggggtatacgatgaaaatattaatggttggggatcttcacttatataccaatgaaataagaacaacaaaaaagatggttaaaaataatgaggtcatgcttaaaaacctttataagtatctaaaagaaaatgaggatatagatcttgttatttttggtggggatctgcagcatcaaacacctaaaggagatgtgttaagggaagttgccttgtggcggaagtggtttcggaaaattggaaaactgatggcaccaagaagaaagaggataaagaatttcaaaattcatggtgtttctgaaaaagtaaaaaagggatttgataaaggaagaatctatccattgatttctgttcgtggaaatcatgatgatgacaaagtattaaaggtgacagctgaaaataaagatgactacattaaacaatacacgttttttgatgagttggtggacgagggtcttattttaaatccgaaggggttaacgttcactgcgggtgacgataagttttacatagatattcgaaattatggtgaagctgatcggtcagttcccaagggtgccaagaatagaaaagttatagcggttttccacgataatgtactgcagcctgagtcacctctttggatgattaaaagcaagagcaaagaaggtgtctataatgcggaggatgttatggtgaatgtggatattgggatattaaatcatattcatgagcgtgtagatccgttatacattgaagcttcggatggggtaaaggtgttgtggcagattgggtctatgggaaggacttccttaaaagatgaaaatatgcgagacgtggggtattgcgggttaatagatacagataacctagacagtttcggaacggttgagattgatgtaataccggcggaggagtatttttcctttcaaaaagccttcgatgcgaaaaaaaggaagagtgactatgaggactttgaattgaagatgaatacagttaatcgaaaattccaagatcctcgcgaagatattaaggcgttagaggatgtagacgatagagtaaaacaagtttgtgtagagacactaaccgagataatggatcgtaaaaattaaggttgataattgggggagccgagaggcttctttttttgtgtatactgttatgtagaaagtatggtttagatgggagaggaattttaaaacatggatgagacaaaaaagaagttatctaaaattcctgatggttctattgatttcgttatatgtgatccttggaatgttttaacggttggtggtaaaaagaaaacttttgaaacaccgactgatcgggatgaatatattaaaaaggtgcagaaaaggttagagggtgcctataaaacattaaagagtaaaccagccggaggaagtatgatggttggggttaatatgttttctatgacgtcttttggtgatgctatttttgaaaaagaagaggttaaaagagcattagtatggtttaaagagcaggatgaaacaacctcagagcaattaagggggtaccgtgatgctcgtgaatattttttatggattgtaaaagaccgaaattggacttacaatttgttaaatgatgagaagtatttcgatggagaatttaaaacaaaagacggagataaacaaggagctttatctgttgtaaaggatatggtactgagattcaccaatgagggtgatcgagtactggaggtatcgccggctaaaaaaagcgtagtaagggatgccgtagagagtttgggacgtatttatgtgcaggggaaagtaagcaagaaggggtcgattctgaatgttacagtggaataagatttataagggagactcgtttgaattacttaatcaaattgatgatggaagtgttgacttaatgttaacagatcccccatataatatttcggtagaggggggtaaagccgcctatggtcggggtcgtgtaggaatcgattttggagagtgggattataattttgatacaaaggcatggattaatttagctgcaacaaaaatgcatccagagcgggggcaagttatgatatttaactcctttcgcaatatggagctgatgtctagggaattagagaagttggggtacactgttcgtgcgcttccgtattggtacaaaacaaatccgattccgcatgcacctaatagactacccttaaatacgtttgagcaggtgctctgggctacaaggggaaatgactatgtgtttaatgtgagggagctaaagaaggcggaggacggacgatttaccgcttcaagtcacgaagcacaaggtaagaggtttcacaccacacaaaagcccgtcagcctgtggactccaattatgaggatacataccaatagaggagataaagtactggacacgtttagtggtagtggggttacagcagtagtagctgatgaattgagacggaaatttattggctttgagaatgatgatacgtattacggaaaaagtgaagatcgattaaaacgtcaaaaaaggaaagtaagaacgctgtgggcgtaaaataattatttgagaggattgtgaatatggtatgggtaaggctacagagtatcttgaaaggtatgaggagttacaagaagaatttcaagcagagcaacaaaaagctaatcgcttagaagcacaaattgaagttaaaaaagaggagctaacaaagatgagagccagcctggaggaaaagggcgttaagttttcatctgtgaaggagcttaaagaaataaagcagaaaaaagaagagcgattagatgatttgctttccaaaatggaagcgacattgggtctggacgaggaagatgatgaggaagacgattgggaatagtattcaactaaatttagttaagggagaggtttggttttggtaaagttacagaaaagtgaattatctgcggttttaaaaactgcaggaagaataattacaaataagcggattgcctatgcggacgataattttttaagaaccgttttacataagaatagcttgtggttcagtgctgttggtgatcgtaatgatcttttattatgggcagcagaaaataaagaggatgatactggggaagatgtaaacgttgattataaccggctgatttcagttcttggggtactagaggacaatgttgaaatagatgttgatgaatctgggattcaagttaaagatcgatccgccttagttaagttagcaaatttggtaggtaacgctgaggagacaccgatggatgaattggttgagttacgagatgaggcaaaagacaaaggtgtacgtgttaacagggctgagtttcttggggcgttggagtatcttcatggtttacgagataaggacgctgatttagaagttttacaggatatttatttcaccaaaactaaagcatatgttatgggaactcggtttagtgtgagattggattttgaattacctatcgaatttaatttagattacgattcttctgatgtattgattgcactgttagagacctcggactcggaggagtttgtaatttgtattcaagagggcgagggaacaatctcttttgtggtagacgaaagtttctatcaggtatctgggtataccaaatacattaagagtgttgaagcggagtttaacgcctttaaaaaagaagagactgtttcgttgaatagatctgaatttgcaaggtttgtacgtttagcgacggtctttttagactcggatggggatgcagtaattaaagtttccgggggaaggggcgttattacgtctgattctgattttaatgatggttcttctgatggtgagtttaatgctgagggggtttccgatttggaggttgcaatgaacgcgaaggatctattgctgcttttcgggggttcttctagcttgctgggtgaagagttaacaattgaattagatatttcaggagagcttgggtatattaagcataaaaacggagactgcttaatggctgttcggaatttaaatgattagggagggagacctcctttttttgttgataaaaaacaggcaaattaatagcgggtaaaatgttaaactgataaaaaatgttctggaggacgtaacatgaatagggttgaaaaggttttaaataaggttcaggagctgagggaagaggttatgctcttaggtagggatgctgagacaataaaggggagagtagaaaagtacaataatgatataacaaaattacgagacagggaaagcttattgaacaaagctgctgttgtgtttaagaatgttgcggatgaaagaaatgaggaagcaaagaaaacgttggaggatgttttaaattatgctttggctaatatttctcttgaacagcagtatgaggcgagggtagaggaggttccgagtaaacgaagtggtaaagagatgacgttggtcttgactgatattgaaacaggtcatgaaaggtcattaaaaaaccaaaccggtactgcattatctcaaatcataagttttttaatgagtgcgattgttttaaagttttctggatcttcaagagttatgttgttggatgaggtgttttcaggtcttcaagatgaagagacaattcggatgtttggtgagattttggttgcgttggctaaaaacgaggggtatcagtttattttggtggagcataagagcgagttgaaaaatattgaagggattacggagattgctttgcagctgaaggattatgataaggggttagaggtcagggaaacagtttaagtaagtcatgtcagggcggtgaaaatccgctctttttgataggtctaaaatcaaaataagttaattttagaataaataagatagttgggggatataaggaaaatcaatattcggggaagtcagcagtaaggaaaaacagaaataaatataaacaggatagaggcaataataaaatataaaataaattgaaggtatggtgtgttgagcgattacataaaaagacgaacatatgtttttatcgtaaaatattgagtaagatgtgtagtgaagttttaggaggaataggtgtgaacttccctgtgaagaataacaaaagtattaaagacttagtggatttaggtggtaaatcgggggatattagattatttagagccggagcaaaaaagttcacttcggatgaaaaagaattgcttctgttggaacggtattttgttttaatcgtatatacagattatctacgtccagaggtgaaagagtttttcgtcaatcgaaagtcatataagcaaatttatgagatgtttcccgatatgggtgatggttatctaagaaccttaatttacaatgaacgaaataggttgtttggggatttggttgtggatccattgtatgaagtaaaaataaaaaatttagctgttgaagaagtgaaagctttaaccgataggatagatgaattaattaaaaaacaaacaatcattgattcagtcaatcctttagattatttatacatagatctgaaggaatttgcagatattgatagagagttcaacagatatgttaaagatcaagattttatacaatccgcaaaaaagcttcaatcaatttcaaaaccttatatggaaatggttttaaatgcgatagataaaaagttgttgggttattttgtttatttgttaacaacgaaagatgattctctgacagataaagataaaattaaaaaacggcaattaagagaggtatggtggctgccaaatgaaaataattgaagttaagggtcattcaaactatgtcggaagcaaatctttattggctattgagaatagggtgaaaaaacttacagaagaaggggttacaggtatagttgttgatatagacggtttggctatgaatgaggagtttgtaccgaaggtggcggaaattatggattcgtataattgtaggtttgaagggttaggagagaaagaaggtttagtggatgcctatattagtagtgggtattttttaaaacggaaaatgggagtgtccaagtttgttcgctggttcagagatatggttgaagaagcaaatttcccaattatgattatggataaccggctagctggggatgagcttattattatgaatgtggtgcagcctatgagatttgatgacaaatatttatactacagggtaattaagccacatttattggagccagcgtctttggaaaaagcggtaactgagggacagaatatttggtctaatagagatatcaggttggttgatttagctaaggaggatgtgggtatccgatttgctgctaatctaagggagagaactatgttagacattttttcaggtataatagataagagtctaaaaggattccttgaaagcagcaaggaaagaggtgaaataacggaaagtaggtaggataagagaacttccgttattgaaatagagaggggtaccaatgcaatgttaaaagagaactatgttttaaatactgttcgtgaggaattagaaaaaggaactgatccgaaagaaatcggtgaatggttagggattgatgaatcaacacttatgtcaattcagttggtacatgagacaggagaaaaattcggaaactctttaaaggggcatgaaattctaaatctgtatcggtcaggtcttacgtttaacgaggtgtcgtggttaaagggtgtgaccagtgtggcggtgcgtttacaagtaaatgatttaactggttcaaaaaaagaagatataaaggcagagagtaaagaaaataggaaaaacatcaaaaatagaattttaaagcggtatattttagatgactctgaaaagtatggtaaagaggaagctttaaaacggtcaggatattctaaagcattttttaacaacatgtataaggaattaaaaaagatttataaaccggaacaagaagttgtttcctcggccaatgattgagtctaggcgttagggggttatccggtgttaagagattggtttgacaatgtaaggtattttgttgaggatcataaaaggtggtttgggtggggtattgctgcagttcttataggtttattaattttggttctagtacttcccgataagagtgggagtgcgggggtcggatccaatacaaataatgaattaaaagagttaaaagcaggatcaaaggagcttgaggaagtattcagtcaactgcaggaaactccggtagggactaatgataacttgccagcatatgaggtttccctgtatttaaagcagccgttcattagtgaagatgatttaactgctgacatacagaaatatgttgatctgatgaagctgaaggtaaatgacgataaaaacgacaaatatttgttggggcttaaaattaaagtttatgatcgtaaaattgtttttgataaagacttaacacctagagcaactgcttattacatgcttaaaaaagaaagtagtaaggattcaaaaactgaggatcaatacgacagtcttggtgaccaggatgaattaatatgggataaaacattacaacagactaaaaatccgaattataaagaggattatcaattgttggttagcgggttttcagagttggatgactctcaaaaaatcacaccactttcagatgaagaatttgcattctatttaaagcttaatatgtataattctttgatgggtgatacatatggcggagcacagttgtatcttcaatgggatttaggaaggaatgtatcaaacgatggtgttgttgccattgtaaatgaatttgagaactttgaaaagcggcaaacggatattggtggattagatgattattatgacaatgttgattatttaaaacaagatctggctataaagaatccacagtttttgttgtttgctacaactaatgaagtggtagatgatgctcaggaagcccaaaagaaattaattgaatctgatccagatttgtacacacaagttattgaagatcatattcaagaaaaagcagaccaattaggggaacgtcttaatacagatgaaaaagataaaacaaagtagttaagactattttaagaagttaggggtgaaaatgtgtctaggttggctgaaaaggttgagaataatgagtttgttaaggaattagatctggcggcgcagtttttatttaaggtaaaaaacagggatccagttaaacaaagtgagttagaaaaaatggcagagagccatttagagttaataaaggatgttcaagatcattttgatgaggaaaaagaaatatcggtatacagtgaatcggatgatttgcatgaaatgggaacgttgtttcagcctttaacttcaaaagatattttatatgatgataacgaagatacagatgttgagtcattaatgttagatgaggaaaacgaagaggataaccctgaaagagtcagactagacaacgttgacaaaataatgttaattacaatcccacctttaagtgcagctcgtgagaaaaaggaaagaggtctgctacgacgactgtttagttaaaagtgaatgttttgataggtgacacccacattgttgggtgttattttgttactatgaaaacagaaataaaggaagcggggatttagatgtctgaaacagtacaaaaaattggcgctgctcttggagttaattttagtgatgagcaaaaagccattattaatcatgaaggtgcaccgcttaatgtactttcatgcgctgggtctgggaagactacagttttagttgctaagatgttaaaacgtgaaatagatgatgggataaaaccagtaaatatgttggcggtcacttttaataatcgagctgcacaggaaatggagtcgagatacaaaatagctcgccgtaaagtgggggttaaaaaaccagggagacccacgtttaaaaccttccatgcgctatttaaaatgattttggagacaatagatggatttaaatccattaaagttgcaggagatggtcagtacaaatacccgttactcaggtttattgagggtgatggtagtcgtgaaaaaactgacatttttgatgaaatgatgcagtatcgaggttggttgattaataacggattaagccgggatggtattgagaatgcgaatcaacccgataaaataacgtttaaatttgaaaattatatagccgttatggagaaatatcaagaaatgaaggatattgatgaggttattgattttgatgatatgcaaacaatacttttagatcaaattgtagatcagggaaacgaggagccggtaacagcatttagaagagttttcaaagatgtttacattgatgagtatcaagatatatcaccaatccaaatgcaaatcatggatgagcttattggggactttaataggttgactgttattggtgatgatgatcaggctatttattcttttaggggttctaatccatcttacataagggacttcacttatcggtatatgggtgcagagagattgtttctttcagacaactataggtgcaagaaagagattttagatccggttataccatctatttctaaaaacataaaacgtgttgagaaaaaagtaagggcagctaaagaaggaggggaggttgaggtcatccctttaaataactctttaagtgagttggctgacgtcattagagaggacacagaggggatgttcggtgaagagttcggtgaaataggtgtgttggttaggttaaataatcagagaacattattagcggactcgttagctgaagcaggtgtacaggttgacattggagataaacggtggtctttacggaacaacaagacatatgaaacaatcatgggaatcattaagatgataaaagaagatgatggttttttgtttgcagaccatatcaataaagtatttccgcacatcaataggtctatagctgacaggtacagtaatggcagcgggagaagttggtttgaagatgtaattgttgagaataggtacggaacacctaaagaggtaattgatcgggttcttagggtacgcaagggaaataacatgaaaaattgcattgggcacacatgggtacttatccagcagtattataaagatttatccgatcgaggttatgggtcgtttactaaacatgaaactatcgctgcgtatatgttctctatagcagatgggttgacggttaaggaattcttacattctgagaatattaaggaaaattttctgttaatgtacatggggacaggaaatggggtacagataaatactttgcacagtgtaaagggtttggagtacgatacagtgtatctagttggattagataatgatgtaattccgtcacaatccagaatagattcatttgaaagagaagggaaatttgaagaaatgaaggagtttatcgaagaggaacggaggttgttttatgttggatggacacgagccaaaagaagattggtagtttcgtataaaaagaaaaatccttctaggtttctaaaagaaattgagggattggacttacctggggtagaggatgaaactccggagacagaaaaaactaaactgaaacaagggtaaccttgtaagaaagtctaaaggatacggacatctaagccgaaatacctactgatgggatacaagacaatataatcgtgagtaattacgttgtttcgacaaagttaaaaactttttgcaaaaagactatttacaccagattacttttatagtaatatatctgtagatagagaaagacaaaaagaaaaccaacagaaacacattcacttacaccaacaccaaccaaaaaacagtaggaggcttcatctaatcatggcaaaaaaagttaagattgagacagatgtccgtaaaatgagacttagttcaggagtttcagtgaaggaggtctgtgaagagctgcatttacagagcgggtattattctgcttatgagtgcggaaatcgtcgatttgcggtcaaagagagtgacggatttgatcgaaacgaggagttcttctatgacgtgggtcatgctatcgctaaaatcaccaaaaagcgtaaagaggatgcctattctttagagaaaaacatgtttgaggacgatgacaagcttaatttaatttatcagcctttaagtgacgaactttataagaaggcattgcagttaatcgactcaggtaaaaatattattcaagcggcaattgaacttgaaattgatgagagagagttagaattacgcattaaacgtgaacaaaaatactcttctatgagtgaagaaacttactataaagcattgcacttaatcgcttcgggcaaaaacgttattcaggcggcgcaagagcttgatattgatgcacatgatttagagcaacgcattaagtacgaacaaaatgttgatgttcttacatataaaaatatttttccggatgagctacataagattattacagaataagtgtttgataaagagggtgcagaggcatcctcttttttcgtgtaaaattaaataaaggaaataaagtaacaggggtgattaagtatggggaaagtgtatgatcctacattaccgattatatgtgcgagatcttcgtataaggggaaggatattcatatcaataaatttgtggggaacaatgtgttagtttcttataataacgaacaacgctggatacaagtattgtatgaacgagtaaaggacggaacatataaccaacctgtaaaaactgttccgtatattgtgattgagaatgatgtttatcctctagattcttttaaaatgctcgggggacgatgatcgtgagaaaattaattggtaaaaatgactggggaacaatgaatctgtttaaaaaaataatgttacctctcgtggtatgtacaggggcatttaatatttgcataggtttatgggaaccggttttaactgttttatggttggtttggttctttgcctttttagttgtgtacacgaaaaaaggaagccaagaacaactaaaattaaagtctaaaaaacctaaatggcttgttgtttctggattagtattgttgtgggtcataggggcggcttttctgttcgataacattagatacggggtagctgtcagtcagattcagtttgaaaatgaagggtacaataaaattcagtctatgtttgtttccggtgacttttccgggttagttgcagtagaggttagggatgataacattactttacataagtttgatggctggaggtattcttctgctgaggacattaccgaggatgttagggaaaactccgggagaatcggtgtaaataaatgagggttttgattgaggagtgtaatgaagatggctgttttagacaaggtactcgaaaagaggggattatctagggaggatttagttgagcacaaaccacatagtctggattgggatgatctgggtcgggtagcaaagaagataggggtaagcttgttacttacggagaaggatgagcgtataggtatactgtatgatgtagatgttgacgggttgttcagtgggtttattttagaggattttttaaagcgggcggggaagagtccggttaggtacatgaataagggaaagcaacacggactaacaaaagaagcattaaagtgggttattcgggagaagttagagtggttatttgttgttgatgcaggatctggggacggaaaagctatacggtattgtactgaaaaacataatgtgcgagtcgttgtacttgatcaccatccatacgaaaaaacccatgaaataaatccaaacaaatcttggatattgaatgttcaggatgatcccaaattgcctaacctaagcggctgtggggttgtttatcgttttttggagcagttaggaagaatgtttgggttaatggtcggtcagtatgaaaagtttgtggggatcactgttatctcagatatgtgtgatatgtctgacagagaaaaccggtactatgtgaggaaggcgtatgaagagtacagggctaatgcctttttatccaagtttactttttacggttcatatcgatctttttatgggttcggagttatcccgtatctaaatgccctcataaggactggtgaggaagacagggctatgaaggttgtaaatacaatgaacaacagggctaagatgaacacaattgaaagggatcggatgagggttagggcaaaccaggacaggatgttggaggagttacttgattctggttcacttattcaaatgccgggtgtagttatgcatttaagaaaacaaaggcatgatcttcgtccagttggcggattgcttgctaatactttcatagaaaagtatagaaggtcagggttagtgttggcttgggattccgatataaaaagatgggtaggatcattcaggggaaaggactttactaatgaggagttaaaaaagtgggggtttattgcccggggacatttaaaggcttgtggcattgaggttgacaacaaaactttgaaacactttagaaaaaattttgcattctattcaaaggaaaaggcaaaaaaggattttacaacatctataacgggtttaaaaagactctcttggcaagaaatagcggactataacgagatgtccggggttaatatggatcctattgttattaaactgagagagggagttaaaggtgctgcacgaattgatgttattagtgacagaaggagagatatcatttttgagaacggtgacgttgtaactgactttactgggaaaacgactaatacgttgctagtgactccaattcttgcgagaaatgggtatcagttattacgagcgtgaggtgttaggttgagtatagaggaattgggttatcaggttagggagtattttgataagtattattgggatgagattgttcaagtagttgagctagtaaatagctatgggggtttgactgcaagggaaaagctgatgaagcttctccggttaagaataagaggggagtagcacgattaattaggggtcgtgtagaggagtgtatgaaaaggtggtttatgtggttatgggtacaagatagaaacttgtttttcaaagtagagaataatgtaataaggtattataaacaggaagcaacaaaactgattattcttcgggggtagtcgttagatagggggtcacagattggaaatcgtagagtatgcaacgtgtagtaggtgcggtaatcggtataagggaaggtttagggtagagaataatggagaagttcattgtgtagactgtgataatcccgacgtgttttcaggaattgagtggagaaaattagaggaaaattcaagtaaaattgagtttgatatggtatccgatatgttaatgtctgatattgaacgcatatatcagttgcatgcagaaagagacgagaatataatggctcaattttataaggaagatgggtcgattaatttagacaaagtgtactttatgggaaatcctttagacttggcttccgctgctcagagggttgcgtatgctgcattgcagtatttagagactcgggatactaagtatgtcggggaagctgaggatatcgtcgagagatataaagaattgcgtgagagaaagttgacagacgaagagattcagaagttttgggaggatttattgtctgacagcatacaagagattgccggtgaggaagggttgtaatggaggagcgggtatatacgattggcatgttgtttctatttgggtttgaattgattttttctatccctttaatgacagattctttgttagattccgatatgtcatatcttttaatggtgttaggtgcgggtcacttattttggcttatgtacaccaaaacaggtatggttaataatggggttgtggcacctcacatatttggttctctaggtgtgttgttctcgatgatcccattgtttgggtttactgttcattttattacctcctggatgatcgggaaatttttgatagtagagttccgtggagggaatacaaataaaaaaacaggtaataataaaaataaactagctgttgtacaattgtttggaaaacccctgacaaaaaagcaaaagaattaaggcactcggcaccgggtgtctttttatgtttgtggataattaaagatgagtaataaaatgtcgattcaggtaaacttgttgtagtaatttgattagatcggagagcgtggtggggttattgttttcttggagagcgtggatggttgcggctgctgggggtttcctgttaacgttaattttatcgttgtggggatcatactgggttgtaaatgggaatgaaaaagatcttaaacatgatgttttagacaaggtgagtattactggtaataaatcaggaacttaccattatgattggaataaaggaaataatgggatcaatctagaacataagaagtatagagatgtggtagatgaattaaaatcaggagagtttacattaagtaaaaacggtatagtgaagagaaccgaagttctcggggttaatttttattgggttctcgattacagttggttaggtaagggaaaagttaataatgtaaccattcagaagtatgtagaggaaaacaagggattgatggtggttcggactttctggttgtctgggagtttgatcgaatcggtagtgtttatttcaattttgtttatctgcggagggtactgcaacaaattaatggtgaggttgttgccggtatttattgcgaagcgtggaataacattagagagtggttcagatccagaaatggtggagaatgcgtatagatctctacttaaacggagagtggtgaccagtcatgagttgaaattcgtattaattgtgtacggttctctcacatcgttaataggggtacttagtgttgacaaagtagacaatatgggtgtagctgcagtagtagcatacttagttatagatttgattgttgttgtttatcttgcgtttgatgtgaagagagcgattaaaacagtaggtatgggaaaatagaatttttaatacgtatgggatagtgatggggtgaaatattccattttcgaaatataaaaatgaataatatcgtataattaataattgccacactcatgtttataatcagagacggatgcagccgtatctaaacgagtgtggttttttgttgagcgggagattccaaataaatgtaagtgaggtgataaaatgaagataaggggttccttactggaagaggggaagatgcttacagatgctcagttaatacatatacaagagagggtaagaacattatctaagttattggacaagaagttgagtccgtcaggaataaagtcttcacaacctaaaaaattggcaccgggtcttgttgggtttgaggtattaggtacggttggaaatatctctttagttagagtttactttagcaatctaaaggtgtcagactataacaaaatggcaagaacaataccttctcatgttaactttgtttttaatgagaggagagatatatggattgaactacataagtatgaagattggtttgaggtaagggacggggtaatttataaaatattgtatacagttaacaagtttaagtgagtggtaaccccgctcactttttttgtggaaagataaagttttgggagattgtttaaaaggagagaataaaaaaagaaggggatttaaatggcaactaagagagaaaaggtacagaaaaacttggagtacatgaaagtccaaatagaaagatttttaaaaaagaattacagaattcagttcagaggtaaggtcttcgctaataagtcactctacaaacagaatcgttatgggatgacaacatttaaatctggcggggaatgtgaagttgatattgcttatgatgtggcagcgggaagtgataaaggctttatgctgcagacggtgtttagagaggcggttcggattggttgtgccttgaatggaaagcggtacatggatggggaggatgattacgaaaaggaattaagcaaatatgggttggtaagttacgggggtctaccagaacggggacttgatttacacacgtatagttgttctgagtgtaaaaaggtgtggattctaaagaaaaataaattatcagttacaaaggatcctgagcaaacgggtatcctcacaggttgttgtaaagccagatttaagtatgatgggaaggtttattacagcaataaggatttgcagaaggttaaaaaacgttagggggatttttgtgagtggacgtcgacaggacattgagaaggttagaggggagaggaataacccaaataggagggaactggctagagcggaggatcgattacgggatgggagaggtactaaaaagatcaagtctaaaagagtaaaacctgtagaggaggcaggtaaaaagaggttaattaaaaataaagataataagaccactattgatgttaataatgataatgaaaataatatcgatactaatagtaaattgaataatgttggaggtaacatcaggaatcggttaaagtttaacccgtttagtttaaagcagtctcaaaaattcatgatggatactttggttgatgaggggttaactcaggggaaaagatttatgccgggcggtgcagctgcttcaaaaacgctggatagagtggtgggaacagacaagcaatcacggtttataaagaagaagatgccaccacagactaaggtatttttgtgggtatcagggttattagttttttgtttgtcatggttgtttgtaattattgttgtgatgataattgcgttcggggctgcggcagttttgatggatgataaagataaggagaacagcttacctatctacagggatcctactaaggtgttagtggtaactgatgaagtaacgaagtctatgtctgattttgataacaagccacataggatgtcggataaattttgttaatattgattttaagaaggaattaatttgggggagttttaaatgaaaaaggagcgggagttattcgggagtttatatcagaaccgcaaaaattggggtcaatatagtaagggcgagttagattttatggagactgttttgttggatcttcaagctttagttgttaaaacaggactttcaattaaaacgttggagagacaatttaaattatcaaaggaagacctgttagattttaaaaataatcataaacagatattgaaagaaattggggagcttaaacaaacggctggtgatggtagtttaacatttacaaccgaccgggttgctgagattttgatagataactggcaggaggcgctgggttattgtagagacggttataatcgagaagaggtgtgtagagcactcggaacaatttttaatgaaccggcatggaacaggtttttaaggaagatgaatcgaatgggttacaaggtaactaagatttcaaaactagatcgaattttggatatgattgatgccggcgaatctttagagacgattgtgaaaaagtatccggattttaaaacagcagaagattgtttagctttcttagaaaatgaaggggtacctagacgaatgattttgcgacaagagatcaggaatgaggggaattcctctttttttaacggatacagtggggctgcttatgcctaacaatagagtatccagttgcagcagataggttatgggtaaggggtttataattgtgttggaggtgcctacttaaagaggaaatattgaaagcgattaaagaagccaaagatgattttgggattgaaatcaatcctaatactgttgattatgaatatatgatgagaagtattaaacgggagtacttcgaggaagagattaaaaataagccaattatggtagcaagtaagatggcggactctcagataaaaaatttaaacaaatttagggggaacaataatggatattcaatttacgaaatttagaaaaggcgaattatgggttgagggtgttgtagacaagggtaagtattcatttatagcaaagttgtttgatgataagagtgctgatttaggtattcaaggtggaagagtaagtaaattagctatttcaatcggggaaaaatggactgggatggataactgcgtagttaactatgatcgtggttgggatattcgcccaggtaaagagtactacaatctgtttaaatctgttttgaattttcttgaaaatgcgcctaagacaagattttaggaataataaaaatataacggggatgttggtggtttgaaatagtggaaaaaattaagttgagtaaggaatctgaaaaagaaaaacgcatagaccgggataaggttgttttgggattagtgatgttaccctttttggtggctatggttttatcggctacatacggaactaagtttgcggttgacaacatgaatgagcagcacgaacggagagaaaaagttgaagcaaaaaagtacgatctgttaagtaaagaactgggtgtgggggagaaaaatataattattgaagaacaaaagtcaaaaaactacgatctggtattaacaagtaaaggggattatagggtcgtatttagtaatcttgatgatccagacaaattaaaacttgaaagagtgttgaaagattaattatcttggggtgcttaatttgaagactgaggaagataaagagtcaggaaacaagtattttgatcgtgcagcaggattgatattgccgttagggtttttattcggtttgatatgtatgttggttgatgggtgctcatttgtcgaatcaggtgcagaactagttaaagaaaagaagtataagttggtcagccaagaactggggttaagggaaaaggatgttgtgattgaacatggtgatcgggggacggacaaggtgttaactaataaaggtacatataacgttattttcaacactgccaaagatccagataatcttgaaattaagcatataagcaagcattaaaatactgtcagggggattattaagttggagagtacaggcaaggtaaagaggtctaagtttggtggtgtaaacccggctgctattgcgttggtcattgttcttatttttatatgcgttttaggtatagttttcggagctgagttgggaactgtatctaaaaaactagatgagaaaaaatatgaattggtgagtaacgagttaggtgtaagtaaaaagaacattataattgatgacagtatttccgatgattatgttaaggcgtctacagacaaaggaagttataaagttattttcaaaaatgaaaatgatccggataaaatagctattagcaatatagtcaaggagtaggggtgtcggtaggtttggtgatcaaaaagaattgctggggtgtctaatcttttcaagcgaccttattaagaaggtcgttttttatttgtatgataacaaataacctttatagcgattgtagttcagttaagatatttataaatatcatgtaaagtgtataggggtgaaaataatgaggtttggtaaggtaaagggagatcctgtgggaattatgtttctgtatgggagaacagagtgcatggggattaagtatacggatggggaggctgaaagggtacaggctcttcatgggttaagggagagtattcaggaagatgatataatgacgatgattgctggagaagacttagagggtaaattttctatttgggaagttcaagctaaggttttaaaagacggggtgtataaggggagtccggcattcatccgggatttccgagagatctgtagagggacagatgtgattgatatgagaagaacttttttaagtatggtagatgaatataaacaaagaacggttgcgctgcagagcattagttaggtaactggattagataatggaggtacagaatggctgaggcattaaaggaacgagaagtagttttaaatgaatataacgatgattcaattcaagtattagagggtttagaggcagtaagaaagagaccaggtatgtacatagggtctacagatcgacgtggcttacatcacttggtatatgaaattttcgataacgctgtggacgaggcacttgcgggattcggatctgaaattgtagtgactttaaataaggatgcttcggttactgttcgtgattttggtcggggagtgccgacggggatgagtaaagaccgtggagtatcgactgcagaggttattttcacagtacttcatgcgggaggtaagtttggtcagggagggtataaatcatctggaggtctacatggtgtgggatcttcagtggttaatgctttatctgtaaaaatgtccgttcgtatttttcgagatgggaaagagcatttaatcgagtttgaaaacggtggaaaggttaaaaccccgttaaaggctgtagggaaaacaaaggaacaaggaaccgaggtcacttttcttccggatccagatatcttttcaacaacaaggttcactttcgacacattatctgagaggttgcgggaaacagcttttttaatgaaaaatatgaaagtaacgttgagagataatcgagcagatgaaccaaaagaagaggtttaccactatgaacgtggtttggctgacttcgttgattatttaaatcaagataaggatattgtatcgccagtgcaattttactcaggggaagcaggcggggttgaaatcgatactgccctacagtggaatgaggggtatacagaaaccatttatagctttgttaacaacgttagaacaaaagatgggggaacgcatgaaacggggtttaaaacagctcttacacgagcaatgaacgattatgctaagagtaatgggttcttaaaaccaaaagacaataaccttgaaggtggagatattcgtgagggtattgtaggtattgtaagtgtgcgggtgccggaaaacatcttacagtttgagggacaaacaaaaggaaagttaggaacaagtgaagtaagatccttagtggacaatttcttctacgataaggttacccaatatatgcaggagaaccctaaaatagctgaacatcttataaaaaaggcaattaaagcgcaaaaggtaagagaagaagctagaaaggctagggatcgggcaaggaataacaaaaagagtaaacgccgacatatcttaacggaaaaacttacagatgcaacaagtaaggacgtttccgagcgtcaattatttttggttgagggtgactctgccggtggtacagcaaagaaagcaagagatcgtaaaacacagggcattctatccttacgtggtaaggtactgaatacagaaaaggcgtcattaagtaagttattgaaaaaccaagaactgcagacaattattcatgctgttggtggaactggtttaggtgaggaatttacattagagacggtaaactacgacaaaatcattattatgacggatgccgatactgatgggtcacatattcaaacgctgttgttaacgttcttttatcggtatatgactaagttgattgaggcaggaaaagtgtatattgcattacctccgctttatgcggtaaagaaaaaggggcatgaggtacagtattgttggaaccagattgagttgtcaaaaataacaaaagagcttaaatccaattatgaaatcaaaaggtttaaggggttaggtgaaatgtctgctgatgaactgtgggatacaaccttaaaccctgaaaatagaacattaattcaggtgggattagataactttgttcaggcagataggacgttttcaacgctcatgggtgatgatacagatgcccggaaacgttggctggaggaaaatgttgattttgagttagatgagtgatggggtgggttttcccacccttttcttgtatggggggtttggaattggtagtggatatagtggcaggtatattggagactattttgtcaggtaatattttggcagaaaggttgcccgggtgggaaaagaataagaaaaaggaagataagaagtaagggggtctaaggttgaggttagttatgaggaatccagtagataattgggaaaagttaaaaatagggagaaaatacatttggttagagagcggtatagatacagtggttcgtgttttgaggaaaaaggaagatggggattggtttggagtaacattagaggtgataaagagtaagcatgatcagttacataaaaaaggagatacgttcgatgttgggtaccgcagaggttacgaacactaccaagttggggagttttacaaagctggagccgtggcaaaaatttaaacagggtgacgcagttacatggaaagatgattacgggtcatttcatggatttgttgcgagtagttgtaatgtggggacagggttagagttgaggatgaaggtcattacgggtcaaggtttctacggggcatatgaggggaaggaactattggtaggtaaggattacggttttgtgcatgaagggaatttaataaatggttggatttaaataaaagatctcggaggctatatcctctgagatctttttgtatcggttagtctaccgataatactccgtaaccacatggataccagaatccgtttgcagcacgagcccatccgtatactttatcatttccgttcaatttagtttgaagctctttcagggttagagtaactgatgttgtgttcccaggttctcttgtacggatcgtattgtttaggtctacgttaggctctccaccagttgtccaagcaattgctttgtagtatttgcttgtaaatgggttgtctaaaccgccgatcgacagggtaacttgagccccactcacggtaacgctagtataagcggaactggctgcaggtttaaaatttaaaatcttctttgctggtgttgggtgttcagccgccataacacctgttcccccagttaacagtaaacctaatgctaaagaacctgaaattagttttttgtacatagatattccccctttaatattgttggtacatggtgaatattccccgtccatatggaaaaaccttcttgtattttacagattcacacaatttacacaactttaataggttaataaaaaaaggaacaaatgataatgatgcaaaccagataaagttcaaggaaagcaaataagttaaggtgtttagtttaggaggggtaaggaatggatcgttggggaatgcaggtaatacggattgaagcaaataaaggtgactcggacgagtttaatattcaatcgttacaaattagagatgggaaagttaaatatcatgagggagaagaattaaaaatacaggggaagagatatgttgtagttcacgatgatgggtttcatgtaaatgtctatgatcctgattacaaaatttcagggacttgggcgtatgttatggctaccagtgagaacgggtctagtgtagggagtctaggaagtgaagtatatacaagtaagaaagaggctattgcggcagctaagagagaaaaaacattaacttatggtgaagtattatatggattttggttaggatcagtgtccgatattgatgggtatcgaaaaaagatagagtttacggatttctacggtatggatgggaaacagagaggtggtcaagggttgagtcaaaccaaagaggtaaatgtacagagtgtaattgatgatgtattaaatgagattaaccataagccggctacacaagatgcggcactttatcaccggtatgcggtacaacaaattatccctgcatatgtggatggacaattaggtgctagagtgttgattaaacaatttagtggtaagccgttagcggatgtacgtgtaggggttttaaatgagctgcaggcaatctatgagagagagtttaaaagggcacagaggcacggtgttgttgaggattttgatgatgttaggttaaaagaggaatcggaaaaagaaagaaaaattgtttatgaaaccgctacacagactgctataaaagtaaggatagcattaaaaaaggcatttcctcatcttccagcaagacactttaaggtaaggaaggatgggaactctgtccgggtgaaatggcaggattacccgatggaggatgaggtcgataaagtggtgaaaaaatatgaaagttctcgttttgatgggatgacggattcaacaacgtcaacgccttatgaggaagacggagtattatatcatggtgcagattatgtacttactgaacgaaaaatttcagatgaacggcgtaaggttcttcggtcaatctgtgagaatgtatatggggactggaatactcttgatcgatttcagcagtggaatagggagtcgaagattgataaggatattgatataaataacaggtatgttggtgaattagatctgtccgaatatggtttagacgaccgtggaaaacgagatgtggttagagaggatgtcggagctgatattgccgataatgttatcaaagaagcggtggaacgggtttatagtcatttaaacaagaatcctggaatcgtaaagaaaaaggtatttagagaatactcggcggacaattattataatcggttaatagttgcaaacattaaaatggatacggaagaacaagtgttttcggttgtcgaggattttctgaataatgaagttaaaaaggatgttgggaatgttttgtcggtgtttaaatcggcattggaaaccgcagttagcgaaaaaacatgggcagcggggttagacaatagagatgaaattgtgaaatatgttctcagtcaggtaagtgaagattcaattattaggtattcgaatgaagaagggtatagggatttggatacattacatatccgatatgcagaggataagattgaagagtatttatctaaaaaagcagattctgatgagtgggatagtggagaatcaatgggacaagttaaggtgttaatggaggattctattgatagagttgcagatcaaaaaatgggtgagctgcaccgatttattgttagaaaattaaggggatcaaatagatctttggcaacgaggattaaagaggatcagagtttaattgcatcatttgaggctagagcggagagtgatttacgtttaggtgtagatataaactcttgggttgatgattattttagaaaagccgcagataatgtagttaaggaaattgaagaactggttaatcgtgatatactagatgcttttgttaaagaggttaagataaaaggaaagcaagtagaggatagacaacttttgaaaagctttggggcgtttattggatcctcagataatattatttctcagatcaaagtgagacctagtagtgggaacttgacgattgaggatgagactaaacggtttattgaagaaaaatgggtcgagttccaacggggtgaagatcaaaaatcaaaaaaattggaaagtgtaattaaaattacacaagaagataaaaaatatgtattggagaaaatagctgaagcagtcaggtcagctaatgatagtggggttcaaattacggagaaggatttacggaaaaaagtaacaccaaaggatgtagttaaactaaaacgaagtgttggcggagatgaaagtaaattttatatcggggtaaacaagttaattgagtcggcggttaaaaaattatctgagagtggatcaggagagtttagtgtggatgatttgatccgtgggttgttacttggtgaagtcaaactggtttttagaaaggtgaatggtgttacccggaaaatggttgctactcggaatactgaattaatatctgattttgatgaggaagatgcatttgtttttgcagattactataatcgacaatcagaggttaaaaaacaggtgagtggggggacgatcccagtatttgatatggaaaagggtgagatacgctcatttgtactggatcgggtgatctcttatcaaatcggatccggtacccaagcagttaagggtatatctcaaaaccaaaccccagaacctaaaggaagatattttgatccgacggatatggaaacgcaaaagataattaaagttttagaggataaagttgtaaggttagtatttgagaaaaaggatgggtctaagagacctatggttgcaacaaggaatcatgatttaattgagttatatatgagtaaggggacttctcaattaagtgcaaacagtactcagattgatagtatgtacgaaaaaatccaagcgcagattgatggggattatgtaaaagtatttgatctttcaaagtgtgagtttcggacgtttaaaccatcaaaactgttaaattacgattttgataataacgttggttcttggttagagttttcaacggacaatgatgcttggtatgatatcgctcaaaatggtgaaaaaccgagtaaatattaccgtgaggggagcaaattagcagttaatattggtagatcattatccgaacggttcaaattcgagcagaaagctaagagggaactcgatgagttgctatacacacgaaagtctctggagaagcaaaaagagcaagttaataaacaaaatcttaaagatggggaaagaaaacaacggttggggttagcaagaaagcagcttgatgattacttgaaaagtattaaaggtgtcgacttcaatgaggatttcaagcaaatgtttgagcggttgaaaaatgttcctggggatttaaatatactgaagtcaatggagaatatggagcagttagctaggatagttaaggtgttggagagcagtggtgttgttattatgagaattaatcgtgcttatttctttatgcatccatatttcttggttaatgcttcaagtggtcgagtgtacgtagataagcccggaatatttaaacttggaaaggttgaattaatggatgaggatgtagctgctgaggattatttaactgaaattgctgaggatattaaaaaaattaagcggcgatccaaattcaaaatcacagcccttgagggtggggacgtaactcgattagagaggttagtaaaggtggctgatactcacaaagaagatgcggccagactcggtattcggtttagcggtatttctaaaacagaaaaattgccggagcatgtagcggttacttttggtcggaataagtggctaattagtccaaagtttgtatgcgatattacaacaggggtgccgtcctacattttcaagaggaagaaaccaaatgctacgttatctgagttgcaggatgcgtttaaggagatgaatcttaatcagagaaaagatcgtgaccagattaagtgggtggcaacaatcattcaaactgcttttgatctaaggaaaacagttaggtcgtagggtgtgggggcttaggctcccacatttttattatctcattatatttgacaaaacaatatataatatgtataataaaaatatattattgaatagggggaattgtatggtatccgacaaggtggcaagtttactgagggagtacaagttgaaattttcagggtacattaacgaacaaatgaagtctgggaaaagtttaatagaatacgatttcactgagcagactgcaaacatgttaagtcgaatcgagaaagtaagtaatgatcctttaaagattgatgaattgttaaatattgagaagattgtgattgaggaagaagggttagtagttgtacataaaaaaggaaaaccattcttaaaaaagaagggtttggcggggcgtatggtttctaaaatactgagataattggttaagaaagaattgagggggataagcatggttagggttaagtcaaataatttacataaggggaaacgatgggatgaaggattggaaataagtaagttaaggtatgttgatgaagaagatgtaagggagccaatctttgatgcaatagcgtgtaaagtgttttatggggttgttgtaattctattggtaatgatggttgttttacatttagtttaaataggatcttagagagaaatgaggagtttacattggcagtacttaatgggatagagattagaggagttaaaaagaggttgggtcatgaggggaggagcttccttatggtaacgtgtattatttaggtaagcgtgtgggatactttgagcttttagattggggggctggatttacgtatacacataccagtgcagtaattgatgaagataaaattataacggaggcaacaaaagtacaggagttaatgggttggcatgagaagtataaagagttagacatggttgatgttgtattaaatgagcttataaccttcaaggatgaggaaatggagttcaaaaaggcaatcaaaaaaggatgttactttgtcacaacgtatgaagatatgtccttggatccttatgaccatcacccgagtaagttaaaaagatattatacggttcctgtggaatttaaaaatgagttggatgaattagttaatgatttaaataaagagggatttaaggtacgggtgtacagatcggaaaaagattttgtgaagtgttagatatcgggtgcgggtatgcacccttttttgatacatcaatcccagataatactataaccgaagtataaaatagatataggaattcattaaatattaattgaggtgggtattggtggatcttattttagctttatatattttaatggctattacagggttgatacctattatagctagtattgcaacgttcacagatgtatttgatacaataggtgatatctttatctcaattgctgataaaagtacattagcaattgagaaggcttttgatcggaggagtcttcgtaaaaggtctagaatttctagaaaagaatttcgcgactataaaaagatggttcggtctatattgaagcttgaacataaagttgaaaaaataagtaataaggttgaacaaaggtatgcggtggttaatattggcgatttaaaagctaaaatagggttggttaaaaacatattgtctccccatgggaaaaggaacggaaaaaacctaacaattagggatttcccagaatcttattggaaggtaaaaaatgttttgatccggtatgaggtaacattgtttcaaattgccggaagatattttcctctatttgatcatgaaatgactctggatcacgaggtacatatcggtcggttatcaaaagaatttggggacattattgatgagctgagggttgatttgtgtaatgagattaagcctttccgagactataggagcgctattgtagatacagatatacagggcgctaaggatacgttaagttttgagaaggattatttaaagagaagtaagggcgactattcaagtattgatttaaacaagagtaagccggctgatacgaaaaaacaatcaacaaacgaacatttaggtacagcatcactattggctgcaggtgttcttagtggtggattggattacggaagtggggataatgttagtgaccaggtcaagcctgagagttcgagttgtagtgggggctatacacattctcattcacatagccactcggattacagtacgggacatgatactggtggagttgatagcagcggatttgacagcgggtcattttaattacaaggagatgttataggttatgagttgcaaattgagggatcagtatacgaggcaagcatttgaagttgaggatattgggagaagggataactatacgttcatttataacccctacgatcagtcggtagagacatatgacacttccagaaaagatagtgggttgggtttcaaacgaaaattagttggaagatcagtaaaagaatttccgtttgaatgtgattctgcttacagttactttgtagagttatacaggaaagctactttatttgagggtaacaatgatatttattttattgggtgggttcatccagatcacgggtacagtttagatgaagagccggtggaggatataaaaaagaaaataacaaatttcaatcttatacgagatgagttacgtgaaaagtacgatcagttagcgggatgtattaaggatccagatgtgaggtcagtgtttagacagcatgtgtttattgcggggggctgcatagcgtctatgattaggggtgatgagcctaaagattttgatttctttttaaactcgaaagatgcactgtataaagtagtcgaatactttgtaagtcaacataatcaaagatcttatgatgatagcgagttaagtgtaagtgttggtgatgatggaaaggttaatctttctgtaccgggaggttacgtaaagatgagaggggggtcaaaaactgatccggttagctttagtccaaccgctattacatttccaaacgatttgcaacttattgtggtcggggcggagacagaaagggagatgataagcaaatttgactttgtacatactatggcttattacaagccgaacctggatgagttttttatagatgaggatgcgtttagtgctgcgtcagataataaattagtctataacattacagatcctaacccaattggggcagcaaaacgtttgttaaggtttgtccagagaggctgggaaatagatcataaagagcatatgaagatactgttgaacgtgaatagagttaaggatgagggatcctttggggaattaaaagaatacacgtttatgtagggtatataggaaattataaaagggtaaagtgacgtaagtacactttacttttttatatatttatagtataattaaattaataaatacatagataggattgtgatgattaaatcaatgggggaggacaacaggattaattgatgtttggaagtatttactgtgcattttacagatcagtatgagaatgtggtaaagaaaataaggctaatggtggaaggtttaagcccagaagtcaaggattgttgggacaaagaggaggatagaaaccacaaaaagtgatataccgaagtaaaaatgatgtgtaaacctatttgcaattgggtgtatacgtgggaataaaaaagactcacctcggtatgtattgttaagagacgtgtgagttctgttatttaacgagtactgtagttgtgggtgatttttaacttggggggttaagcatgaacgagtatagagtgtgggacgggaagaagatgtattattgggatgatggggaattgtatcttattatctcaggtggagaatggggattgtaccggaataatgtcacatctctacatgcgagtcttatagcgtctagtaaacaaagaaacgcagtccttatgtggggaacgggtcgaagagatgaggaagggagaatgatttatcccggtaacaagattgaatattacacagaggatttttctattatcactaaaaaggtaaggttggttaacacaatcgaggtaatcgatgggttgcacaatgttcccggtgattatgcaaagaacatcagaattataggtgatgtttatgagagagtggaggatgcggaatgaacacagcatggagagtttgggacggagaagggcgtatgtattattggaacgacttagggatgagtcttgaaataacaggagacaaatggtttttatggcattcatggggtgacggtagcagggcaaaggttgtagaaagcgatgacaaaggtgcggctctcatgtggcacatagggtcattggataagaacaataaagctatctatgaaaaagatatcgatatgttagatgaagaaccgatgatcgttgtttacgaaaatggtcattatggacttaaattccatgatgatagtgcctatttcgatgattcagtagattgggaagaatgcgacatcggaggcaatgtttatgaacatcgtgtgttattggagggtgcggagtgaaaatacccaaaaggatagagagagccatcgaagaagcgtcaatacactttgagatagctgtcaagcatagccatgaaatacgcaaatggctagaagaaagaggaataggaaacgatacaacatttgacatgttaattgattgtatcgaagaaggggcgggggatggagaagaatttaaggaatttattgaaagccacacaaaaaaagaattgacgcaggaaaacagtcttttttaagaataaggagggtgcggagtgatgtacaaaagcgggagtgtttatctaacaagtaaggacaaagaagtgattgacgaattaatcgaaatgtacgttatctcgataaaccccgatgaagaaatggaagaaggaatacgtagaataagggataaaatcggcagccatcatttccacagacgaaaaacaaataaggagggtgcggagtgattgaagttacggtaaagagtaagattagtggcagaataaaaagaggatcatttactgcaaggcaactactagatacatatgaggatgatcttgtttgtaacctgacgaaatgtgattgtcagccagtgggggaaacatacgtagtagaatgcaattgttgtgaagagtgggaagaatatgaattatcttttagtgatggatattaaggaggtacatagtgatgcatgctacatacagagtatggaacggtgagaagatgtactattggaatgacaatgggttaagtctcaccattaaaaatgatggaagttggctgttgtgggaggatagaaacaaaatacatattgttgcgtcgagtgatgacggaaagtcagttcttatgtggggtagtggggtagcagacgctgcgggacgtttattttatgatgggtcgctgtttaaagcacctgttgatattaacaaccatcgtcacggtagttgggttatttatgaggttgtttatagaaatggaacttgggttgctcagtatgtggtgagtgaaacaggagttgttttgccaagaggttatgtagcccgagaattaattagttattttgatcaggaatcgggggatatagtgtttgaggatgtgtgcctaaccgcagataaaaccagcgcagaaatagtagggaatatttatgaagattacaatcgtttggttgacggctgtagggaggtatagatgtttacttttttgctgtatatcggtattactgttttaagttccattttcttttataaattgtggaatagatttttaattggttttccgattaaggttaatggagaaagtatagtaagctctaagtacagttccgaaattagtttggatgaaaggatgtctggggcgcttacaacacgaggagcttttctaaacctacttttctgcttaggggtagcgtatccattactgtactctatggtgtattcaatgggttctgatgggttggaggggttaatagtcgcagttatgttcggttcaaagtttttagatattagggttatttatggtttgcttatagtcacattttgtttcacattatttgaacatataaggtttcgagttcggtttaagattaaccgggttttacatgatgagaataaataaacgtagtcgacgggattgtgaaaaagtcaaatttgaattcagatgggtggcgtgttaggtgagtgaatttcggggacatacattggataaagttcaggctgcagcactggacaaggtaatagaatatatgaaatatttgcatgatcttgatgaagaaggagaagatatgcaggacaccgtagattcatttatccaagaaacagaagcatttttatatgaattgggagcaatcaagaaaactgtgtttagctttgagggggtacggagtgatgagggaagagaaaattgattattgggaaggaaaagacgggaaagttaaagtgatcattactgatttattaaaaatgcgtccgtacacaaaaaagggaaatagatctcctgtgagtctatttgattttgacggtaattaccggtgccgtattcttcacatccagaaggatatgaatttagttaggcgtatttttgaggcgcttgaagccgatgataggtttcagaattttaagctggggtttgataaagaaatcaatatgtatgaatttacgataaatgaacatggagacatgccacatagatcgtttaatacaatttgtgtagatgcggttatcaacaccacatacgaggcattgatacatatgaggtacacaccagaaacaaaggttaggggtgtgtaaattgagtctatcaaaattatggggtggaggtaccgaacatgtgtaaagtagtcacggttgacgtttgtatgaactgcggggtcaaactcccaaatgaagtggaggcggatatatgctgcagtgggtacatgtgcggctgtcaggggttgccggaaccggttttttgtgatgagtgttctattaaaatatttaatgggatcggttaataacagtttaagaggatccgataatagggaagagttatttaaatacggaaacgattataataagtgaagataaatatgtgagtaggggtttgactaggtgaaagatataaaagacagaaaatcatttcttatgaaagaactgttaaggtttagagagtttaaagtaagtgatctaagttggttagagaatcttagtttggctgaattggaaaagttgcatattaaagttaagtgtgagcatggaagattaataaaaagagaaatgatcaattagtgtaagggttgcgaatttatgcagcccttaatttgttatcggataagtacaaaaaagatttttctttatctctgtgtataatagtcattaataggatcaagatttttcacaggtacgaaggtggttaagttgaaaaaagcgaagttagttaaagttatgtattttaaagacaatggggatttttatttagctgatgatgagttaattgcggatccaagagattatgaggaactcgttgaagtaataaaaacacggagaaggtttaagggaatgacaatggttataagtgatggcggtgacggtgtatatccttatgtcaaaccaaggttaattaaagatgatactaaagaggaaactagaggcttttttgggtgatatactggtaaaaagagtaagggggagaggtattgagaaaattaacagacttggtacaaaacagtctaggtaaaaaagataagtatgataggaatgttcaggttacagagtttatgaaagatggcatctacagaaccatgagtaatggagttttcgtagcatccaagaaggttcacgattactcagaccttcatcttttcgggttgccggagggctttgagggggttcgcttactgattgataaaatcccatttaaatattggatcatggttttggacttctataaagatgtatatgagaagcatggaacagaggcttcggtattgttttattataatcatgcggacttggatatacctcagtattatccggatggaatcatacaagatgggagacttatcgtttactgccccaagcaaaggaacacaggtgttaggagtaaatttgatgatgagcagatgcgttggttggaggataatacataccctattttagagactcacagtcatcatgtaatgaagacattttttagtacaatagatgatttaaacgaacaaagatttatgttttacggtgtatatggggagatcaatacatacgacaattttaagttgaggtacatgtatcagggtgagcatgtagaggtaccggctaccacattatttgaatttccggattgggctagtgatcggggagatgtaaatgacaatgaaaaggtgattgacttagttgatattgaaaagggttgttttaaaaacacacattcatatccagattgctggtttaatcaaatagataggagtgttgatttagatcctgtggaaatgagggtggtcatgtctgaggaagtactttattagttggggggattaagataatgaaagggtgtttagttatggggtcaccttataggagtgttgatatttttaaggcacttgaggaggcacaagttgaaagggttaactccattgagctacttaatgagttccacaaagtagggaaacatgttttgggaaagaaattgccgattgctggggtggtggttagaaagtctattggttacttttttgatgaatctacggttaagtatagccattaccgaactttatccgatgaggaaagggaaaacgaaacaattctaactctagcagaaggggaaaaaccgtatgatgttttaaccatagatgacggattaggggaaacagaggttattgtaaaggatagcacacaggttaatggggatgttcgtgtaggtgatgttgttcaggctacagttaggtatttagcggatgcctgggacgtaaaggagaggaaggcgaaagaagagtatttaagttttcctacgttgcgagagaatgtagatcttgatcgtcatccttacaatcctttacgagatgtgtatgctgcgatcagtatcgataaacttccgatagacttgcctgaaccagtttaggataatgaataaggagtacgaattgcagttaactattaaagtttaagtatacttaaaattaaggaggacaaagttatgtcagttaaagaacaaacagtaactaaagttgaggttgccggagaaacatttacgttagataaaccaactaatcaagagggtgtaatggagttgctacgagaattaaaccttggagatcaaatagagggcgccacagcgtctgttcaagacgatgtaatggttttctcctatccacaaggagataagggttaagagtttatggaggaaaacaggaaagaagtttatgtacttattgatgaaaacttaggtggactttcccgggaattttttgaagtaacaaaggaagctcataagggtgacttaattatttatccggagggggcttattatttttcccacggacctttttacagagtttctaaggtatttgaagatggaaaagttgcagtggaggatgacccagatcacatagtcgaactattggggtacaaggtattggaaccaactaatgtgattcatttaaaagaccagaggtataaaatggttgaccgtaaagcacttgttggtgacaatgtagttatttgtgaggttcatgaggatatgggtaccatagacgaactggggaaaacggctaaggttacagaggttcgggatagtggacatattgacacagctgaattgggggtcgtgttaagatctgaatatcgggtacttgatttactaggctaggtcaataaataggaagataaagttaaggagggtttaatccctccttttttatttataattaattattgaacacaaatatataattgatagtgataacgatattgaatgtgtttattggtttgataggagggttttaatcttggtgtactctttgagttaagataggtaaaagagaatcggtgtagattacaaataatatgatgaatttagggtggtgtaggatgaacgaggatgattcaattaaagaaaaaatgtgcaaagtcgttagtttattatcgaatattaaagagtttaaagtgcaagatgctaagtcagataaagacttatggctgcttcaaatacacgactcaaaattcatgcctaatgcaaggagtaccatttataaaaataagcagttaatggacactattcgaaagtctggggataatgatttattttagggggagtaaacaatggctattggggggtttagcaaacttaatcagatgcagaggtatggtgacaggtcggaaaagatgcctgacttaattgggggttgggataaaaaaacgtttaacaaggctaaggacgtgttgaaggacgttgaggaaagctatgttgaatactttgaatttcttgatagttgtgtagatgttacagttttgagaggaagtccagcagcaataggaacacaaaaatttcaactttcctatcaggaatttaatcaatatataaagcctggaattacaaaaagtaaatcagaggattcggagcttgggtttttgtctgatttcgtgggtgattctggtgcgtatcatttacctgtaggaacgtatgaggttgagaagatagctgaggggctgcttattcgggttcgtgttggagatccaaactggggattggttagtgtgtatgaggcggaggtacgaagtggcggcataacaaggattccatgtgaggctgatgttgggtcagtttatgttgttgagtggttactgaacgggaacattgtgaatgaagaaaatgctccacgagttaattcggtaaagaagtttattggttcattctttccgctaagaacggatcaagattttgtggacgttccctttttgtgtgacaaattaaatcgagatatacaaaacaactggcttaatggtgggaataagaaaaaatggattaaaagatgggttgcgggtgtagattcaatgttagcagtagcgactaaagaagatatgcagaatgaagggtatagaagtgaaatacttaggtcaatagcacaaaaaacacagattgattggtctaaggttaggaggtgagtgacttggcggggattgcagatttgcaaaatcgtgatacatacaatgtatttaatgataaagctgtaaaaaacttgtttgttgtttatggattaggtggggtggcttcgcatgtattgtaccaattgttgttcaggattgaaaatttggaacaccctactgacatattgttatttgatggtggggaagttgaaaacatagatgtaaaaactggtttatacatatcggaggatttaggaaaaaagagaattgatgtagtacaaaaaaggtacggaagagtgttttcttcaaatattatggctgggatacatccggaggtgttaaatgaaagtactcaggggttaatcaaaaatactgcagtttacattttagactttaaaccaaaggggtctaaggatgctgacaagttttttaacgcctgtatggaggatgctaataaagagctactaagagataaggaatttaagccttctgtgtattttgtgagggcttataatcgtggggaaacggggtatttgagggcgaaattgtgcggtaagtacggtgagacagtgggacatatgaacgtagatcgtggagaggctaaaaaacagtctgctgcagagattagtactcgaaaccatatgttagcccagagtgtgtttaattatttaaatttggttatgacaccaagtttaacaataaactatgttgctgaaacggggaattttttatctggagaggttaaaaaagagtatattaaaaaacagagggaaacaattttccataaattgagggttcttcacttggttagtcattatggggaagatgatttagttcattttgatgatcaatggaataaggtttacagtcaggctgatgatatagggagacgtattaaacaaggtatgtcacgcactggagacttttcgcataatgatcatttatattatgtacagtctctagccggattatggagaaccaggcttaaaattaaaagtaaggattccgatatagtagatgatgagaggaagagggttgatcttcttttggcagtgttttcaggattaaatcaacaagcatcaatttattttattacggctataaaaattgcagaggattctggttgggggttacttgtgtaaccctctattgtttctttaattcattgacatttacataataatatagtatagtaaaattagtaaataaggagagatgatcgattgactatactgacagttattgtgggagcgggaggtacagggagttacgtcataaacaatttgcttaatttatatagagtgcggactaaagataggcatcgggtcatgctaattgacggagatgtcgttgaagagaaaaacctattacggcagggatttttacgtaaagacttaaataaagggaagtcagaggcactaataaatcggttcagaggtatggttggccataaggtgctactggcagcacatacgggttatgtgcagagtctgcaggatatagaccgaagcttggaggtattgatggatcttggggagaaagtggatccagatgatataagcgaggtcatattggttagttgtgtggataataaccttgcgaggttaaggctaacaatggcgcaattcaaggtatatcaggattttaactgcagggtttcgtttgtagactctggaaatgaagaatggtacggtcaggttcttgtatctgttttggatccggaatatccgaacccggttacttttaacgaaaatcgggttaagttcgacgagggaaaaatcaagggtcactggttaaataatatatttgtgttaatggatgactggaaaaataaattaaccaggggagaccatgaaataagttgcgatgtaataacggagagtagtcctcaaaatatcgcaacgaatatgaccgctgcaagcggagttctacttgtagttaaaaatatattagatagagaaccagtaccgaaaaacgtattttttaatactaaacagggggttaatcagattaaagataatttggttaaccaagaacaatatactaaacgacttaatgaactcgttgagtatgtaaatggggaaggaaaagtgtttatcttctcggtaggggaagagtatatggatgaggatctggtagatgaggaagattacgaggatgacttagattctcttgatgggctgtcttgggacgatttagaagaagatgaggatgatcttccggttgtgggatatattgaggatgatttagaagattggctggattttgaagaggatgaggctagtgtctccgaggtgcctaaaggtaggaataaccggtcattgtttaacgaagctcgggattggtaggaggttagtgctggttggagaagacggtgtatgtaaaaacaagaggtaaatttatattagttcctgttgattcgttgtatgttctagttgatgacaatgaaaacaaggaattggaggtaccaaaaaacctagtatcggttaagagaaactcagatggtactcgggagttaacatataggtttccgtatgtaaataaagtaatcaaagttaatccgggggttactttacacagaatattatttgctgggaggactacgggtgaccataggcaacttagaataactgattcgatggaaaactttctgagaaggtatataaaccaaacaggagggtttaggtacaaaagtcgatcaggtttggtaatgaagatggatgtttcaggcaacgataacaatttgcagcatagcagagagagtatcaagctgtttacctgcaatgaatcaagacctctgatgccgaatatttatcaagatagtcgtatgtgttgggggcggacagacaccgggggtaggttgcaaacgctagatgatttacatttgtattttcaccggtttatggattcaacagcaaatacggatttatctgtacggacttataacaagcaaaaagtattgagagcgttaaatggggttttaacaaatataaataattcatatttagatcaaagttataaagattctttaagtcaaataatctctttagagattgaagcggtcaataggcggaggcatattgaagttgaaacgtatacgtatttatggctcatgctatcggatatgttggatatcgatatagaagattttcgcaaacaattagtatctccgggaagggaatgatggtttatgggaaaagttcaaaaagaacccgttaaatatttgaaggaagcggtacggattgaagaggttagaaagcatttcgagcaaaaaattttagatgctgatcaaatcttatctctagagaagatagttagggataaaacgaccccggaggatgactattcgttatttattcaggggtttaggtcttctgaaattgcagagtttcgaagtgtaacaagacaagcagtgtccgcaaatataaaatctgaaagtcaaaaagtaaattcgcaagatcaagatgaatcaaaagaaaaacataaaaccaatcggaagaaattaattaaagctgccgaatggtactggggagtatatattacagatcaacgtggaacgttcgatcacattgaggatcttatatctgttcaggcttttgcaaacaaggctcggatggcgaaactgtattatgagttgggtgggaataagatggacttcgatttagatgagttggacggaaggatcagacgggggaaaaacaatcaaattaaaaatgaggcatttcgacttttagataagggaaagggttggaaagacttaaaagaggatttagggttaacggatagtcaggttatgtattatataagagcgtggaatgaaaaattggagaaagaaataaagagctgatattacgggagtctttttatagactcctttttgttatagtgattttaaatcggaaggagattgtggtgggataatggttaaagtttaaagagaagtgagggggaatatgtatgtccgaggagttaaatggggttattgaagtaggaaccaaatggtattatgaaacggggactggttgggtatggttaggtgtaatgttattaagtgggttaataatctgcctactatcatttagattcttatggctaaatgctaattatgaacccgggttgtcggtattttggagacgattttggggaataattttggcgagtggaatattgttaggatccggaggtttaggtatagggtacttggtagtgaaagatcaagataaaacgggagtattgtcaccaatatggactaagacaacaattcaagatgtagaatcagttgctaatagagggttctatcaaggagttaaaaataatcagggtctaagtggggagatacttgatcacgctgtaaaaaatgcaagcattgcgttttacgatcctaatggggatgactcttatgaagtgtatttaaaattaaatcaagtagttaagggttggagatcggaaaacgccgggaatattagtattcaagttgtagtggtggggaagaacgagtttaaaaaggattatggtaacttatatgatttaggtgatgggtctacatatcaagtggttcagaataaaaacttgttaaagatttttaatcgagttgatgtttatagtgaaatatcttttattgctggggttactggaggtgtgttgttagctttagcatttgttgcggcaattgtttgtaggcatgattggtacttatatacgattatagaggatgatgatttaacctatacggatgcaagttaattaagatggtggtatcgccatcttttttctttggataataaaagacttaggttaatttaggttttatagtaaacttatacaagaatataacagaagggaagagggatcgatgaagataaaaaagtgggggttaattgctgccactgtaattattttgctccctatgtttggtaacctggcaaacgctgcggagccgttagataagggtaaaaatgactggaagttttcaacgtatgaaaggtctacaaaaaccggaaaaactgtatataaaaataaaccgggttcaacgtataagatatggagtcactcagggggaaaagcgtatacgcgtaaagataaatctagatatttaccgggtcagtatgcaacacctctttataatgggaaggtacggaaactaaagacaaacaaatctagtgtttggttatatgaaccgaaaaataaaaagacgattaacattacaaaaaatacaccaatgaaaaaagtaaagaaaattaaccataaagtttcaatcaccattcggggcgagtcaaatggatggttttccacagatttaagtggaaatagaaagaagatggtgtatgtaaaggcatcggatatatccggggataagtactggtttttaaaaaagaaaacgaaaagtaagccaaaacctcaaaataacgacgcaaataaattaaaaacggtaggtaaaaataaacaattaattttggttactgcgaatagttatggtacaagtaaggcacaaattcaaacatttgaacgtgataaaaatgggtactgggttaaaaaactgtcggttagcgggtatatcggaaaatacgggttcgctaaaaaaatgtctgaaggtgggaaggcgagtccgagagggaagtatacgattgggactacttttggacgagttaaaaacccggggacaaaaatggcatatcggaaaataacaaataaagatgtttgggtagatgatgttaagtctaatctatataacacttggcaaaagaagccgactaaaaaccggtggaaatctgccgaggagatgaaccaaaaagcttatcagtatggatttgttattaattacaatacaaagagaacaaggggagcaggatccgcgatatttttccatgtatctaacatgtatactttgggttgtacggggacatcacaaaccaatgtagtgaaaattatgaaatggttagatcctaagaaaaacccagttataattcaaacgccaaagagtgagcttaaaaagtattaaataataatgatgatggcaatattgatggtaaacataaaaataatgataacttcgatggttttaattgataaaatagggggatgatcatatactataaaggcaaacaaacctttatgttgaccccaataaccttgtttataaatgcccatttaacagcagtcaaattcccccttgactgctgtttttatttttacttactttacttttatattattaaagtgtataataatattaataaaatttagttgtgggggatatttcatgagagatagtgtattaggaactaaaaatttaagttttaattggttagaggatcgaacaattttattagcacctactggaagttatgcgtatgggacaaacaccgaaaattcagataaggattataagggtgtttgtattccaccagaggagtactttttggggttaaaagcgtttaatgaatataacaatactggaggtaaaaactttaaaaatagtagagatgatgtcgatatatctattatgcatattaacaagtttgttaaggagtcagctaagggtaaccccacaagtttagagttgttgtttatggatgagaacagttatttaaaggtgacggacttggggaaaattttaattgataaccgacttttgtttttgtctaaaagagtaaagtctacgttcggcggttttgcgaaagctcagatgcaaaaattaataacgaaaaaagggaataacacagggagacaggaactcgtacagcaatatgggtatgatacgaagttctttatgcatagtgttcggatgctaacgagtgcaattgagattttggagacgggtaattatagaacgtatcgaccagatagagatatgctgttagactgccgaaatgggaagtatagttatgaggatgctatcgagattattaagcattatgattctaagttacaagaggcgtatctaaactctagtttacctgacgaggttgatcatgaaaaagttaataagatgctaattgatattaatagagaggctttgggtctgtactgaagtaagtgactttgggaatagggtcaggagaaaggggagtaactatgaacgatttaccgaaaagtggtgtaattgctgctgttgtgtgtttagtttttgctattgtttgtagtggatggttattgcataaaacccacaaaaaagatgaacaaataaaacaacaagcacatgaactaaaagaaaaagcgggaaaagaaaaagaagaagtgttgaagaaggggaaagaggtagacgctctggttatagacaagtcaaaaaacacgtattcgagcggggcttcggtttctgtgacgccggtggtagtgggtggcgctgtttacagcataccgacgacttccccgggtattgaaagcacaaattattatttaaagatatatgccgatgataaaaattacaatatttctgtaccgttaactttgtatgctgaaaagcaggtaggttcaagattaaagatcaaattgtataaggacaaaatagagattctataagaattgggttgtttggtagtggggagagtatttgtttaaattacataccggtaaagggtagagccgttaaaggctcttttttgtttgcatgaaagtataaaaaagggaaagagacttggtgtctgaaatgtaataactcaataagtaacaaccgagggtttggtttgtcaggtatacgtagattgggggaattatcaggcttctgggtttacggggcttgataaaatgtcaatgaaagggagacgattattgttgggtgctgcaattaaaaaaactatagcaactacgttaattgctacagcagcattgccgcttttatctggaggggtacatgcggcgggaaaaaataatgagggtgctgtagtagagaacaaagaggttgcgaacaaagatcattatgagtataacaacaaaatagatttattaggattttcaaataacattggtgatcataaagtatggagcaaaccttatggatctaagggagctaagtacgtaaagaatgcaaaagatttaaagggtgagcagttggaacttatcagagaagcaaaaaacgataagtcgacttggtatcagtttaaggtagacggaaaagtaattgggtgggtagacacccgggcagtaaatatacaacattatgaaaaactgaaggatcaaaaaaagtatgacaatgttggtgaagtaagggaagatagcaaagacttcgtttggaaatcaccgtatggaactaaacactcatacaaagttaaaccactatcggagctaaagggtgaaggtctgcagttagttaaaaaggcaaaaaccggggacagtatttggtatcagtttaagttaaatggtgagatatatggttgggttaaagaggactcacttaatgtcggaatgggaaaagttcggcacaaagtagttagtggggagactcttgagaagatcggcaaaaaatatgataagccatggaaaacgatatctgaattaaatcacttagcaaacccgaatgtgctgcatgttggacaaattcttttaattgctgagggagttcctgagcaaccagtatcagatagcggcgagtatagaagtgaaaatgaaggaaatccggtttataccgctccggcaaagtctacagatgatttaattggaaaaatatctggggcgactgttggaatgaagagtaagtataaaatccttccgagtgttgcgttagcacaagctattcttgaatctagaagtggtcagagtgggttggcggttaatgctaataacttgtttgggattaagggaacatataaagggcaatcggtagaaatgcctaccaaagagtttatcgatggtaaggaaacagaagtacctggtcagtttagaaaatatccatcttggaatgaatccttaattgattatgctgagttgttagcgtattcgcctagatacgctgcagtcgtaaatcaatttgattataaagcagctacaaaagcgctgcagagttctgggtatgcaacagatccaggatatgcaaacaagctaaatcatttgattgaaacttataatcttacacaatatgataaatgagtacagatatctagatcgttaagatctatgtaccaaatgatcattatatagtgttcatataaaaagagaccctattaagggtcttttatttttggataatatccggtgagaatacagaaaaattaaatggtacgatgaggttaatttaataacaaaggggttgtttaggtgaatattggtttagatattgatgggacattaacaaaattagatagggttttagaggtatttaatagggaatgtaaaaacgaattaactttagaagatattcaatattatgatttacataaatgttatggggtttcaaaagatattgagaaaaatgtgtgggttcaatatggggattatattgtaaagaatgcagtaccaattaaaaatttgagggttattgttgagaagttccgggatattagtaacaaaatcattcttataacatcaagacctaaaactcaaagagaaataacagaggcttggttaaaggaaaatggagttaaatatgatgagttagtgtttgctacgagagataaatgtttttatgtgccaaagtataatttaaatgtacttgtggatgacaacccagcagagttgatggcattaagaaatagtccattttggtctgtgtgtgaaggttggataattgatcaaccttataataaggggtgttatgcagataagagaattatgtttttcgatgatgggactttggttaatattttaggagcacaatcgggaagagttcggggttaaataagagtttttaatacggtcggtttccgacctttttatttttgataattattaaccgaatcactttttgtttttagattatactctttttagagaaaagactttttaagtcgatttttatacaaaaactgaatttaaaaaacaaaaccgatttttatacaacaaaaagagtttatttaaaataagggggagttttttgaacatcaatgattctgacaaaacaaaagaggattgtattaaagaactagctgatttttatggactaaaatatgatccaaacaaaacagagcttactataaaaaatgaatctggagaggttcgtgttttaaaggattcagaattgggtgaggttttgggtatacctcgggtaaataattgaagttgctaaaagtaagggtgtggaataggtggagtataactgcaatactcaatattataaaggattaccgatccgtttaattaacagggaggattatagacggaaaaatgcgaagcggtttgtaattaatgatacgaatcagaacgtatggattcccaaccgacacttacagggtgatggtacaattaaggaagatgaagatattgattatatctttgttaaagcaggacggcagctagagttagcggggtatcagttgtggtttaaaccaattggaggttaaatcaatggaacaatatcatggatatgtatgtgaaaagggatgcggtcataccacagtggttaataaatattataagcaaaaacaaatatattgtgctgtttgtggaagtaaggatcaaatggattatttgggtgagtatcaggtttcgaaaaaagaaccgactaaactgacttggggggaagattaatgtctgatgtaaaagatattttcaaacaaagcacgaaagaggctggcgagagattactaaagcttacaagtgattgggagaaggatttaagtaaggttagtaaagaagaaatggttgtattggtaaagtatgctgcacaggaaatggttcgaagatggaacatgtaccggggtcgttttgagcaaaaagactttggtcaaatgtgggaagttgcagatgttaaatcggagtattgtgaaagtgatgggttaacaagggagttttataaactaaaaaatggtgacgaggaaaagtgggtagatgtcaggacgtatctctctttacttgatttaggtttaattaaaacagggattaaggttaggggtatgttaggggcagaggttaaaaatggttgtgaaaaagaagtttaagataggtgatagggtctgggatgacaaaagaggatatggaacagtgtccacagaaacttaccatactagcaaccgcaatacttatacaggggttaaatacgatgattacctgggacaaaaatatcctctttgttgtgaaacagatgaacttatattagtaagggattaatggtgggggttaggacaattggggatgcatacggggttacgatttaagggtattgttaaaaaagagtttcgaggtctagttaaaaatttgatggtggatcgtttagaatggatggatatatacgaacactatcctcagtttgaatttttaagggtgtgggctgggtataaacgatcgtatcgaataccctttggtgatttagttaatatgccaattgagtgggcagaggacagtgttaaatttaaaccaaattttgaggaagatacggggttatggacgtttcagtgcagtttacggaatgatgttggtacgattgaaaagttttttgatgatatagtccctagactcgttgagaagtcaattcatattgagaggttctacgaggagtggagtcggagtcagctctatgaaattgtagacggaaaagttcatctatctggggatgatgggatatggtacgggatctaattgaagggtgcgaaaaagatttgttaagggtctacttaactacaatggaggatggttagagtgaacaagtatgctattggtatgtataacatggctgatggagatcataaagttaaaattgtggaggaagagacgagtattaaggctatctgtaaagctgtcggtgatgaagaattatggggcatcgtagatggtgaacttccttactctactgaagaagaagcttgtgttttttacttacagggagatttatcaatatctgagccggttctgattgggaagtctgggaatacagtatgattattgttataacagaagatgtaagggataaagaaaccggtttaacagagactatagtttcgtatgggtacgatacagaaacggggaaacctgtaattttgccacaggtaggtattgatggaatagacggggcggttttcaatagacaaatcggggagcatgtcatttattagggggatacatatagtggataataatttttcaagagtagagaaaacaatagcgaacggagtagagctaaatctaggcgggggcgcatccgctctggttgatttacatgtaagtgaggaagggtttttattaatcgacgggttaggtttagataagtttgattatgtgttcaactggcataaagatgataagggagataatagggtagagctgcagattctctttcctaatgagtagggtggttaagaaccctactttttttattattggggtttattttaggtgagttaagaggttagtgtaatataggggtgattattttgagtgaagagaaattcagtttagctgattatatttatcgtttaagaactgagagaaatttaaaacagaatgaacttgctaaacgtgcggggcttacaacatcttatatttcgcaaatagaaagcgggaaaaggacaaatccatcacctaagacaatggaaaagattgcacaggcgctttcaataccaactattgatgttataaaggtaatagactttatttccgatgaaaatccggtcaataatttaaggttatttgatgttagtggtttagaggatccggacattcagaggattgaagatcaaattgagttgttgaaaataaaaaataaatacaaagaaatgaaaaaaaggtagaggttgatgttactttgactgtgaacactggtgattaaaactaaaatgtggggggaaacgtatggttgatttcaaaaaatttagtgatccggaatggatagaagagtgggagaggaagaaaaaagaacgtgaaaagttgtatgaggaaaaagagaagttaaggaaacaaacagtatgtttcacggggcacagacctgacaaactcggtgggtacgatgaaaataaccctgtaatggttcggatgcggcaaaagttatttgaggttattgaaacattaattaatcaagaaggaaaaacaagatttataagtggaggagctttagggacagaccaagaagcgttttgggtagttgaggcattaaagaaagagtatcctaatatcgtcaacatcgtggcaacgccatttaaaaatcaagatagtgtatggtcagatactttaaagtataggtaccagcatatgttagagaaagctgatgaggttgttaatgttgaggagttagatgagtataaagttaaggggcagacgttaggtgagttttcaaaagaaaaaatgaagaaacgaaatgaatatatggtggatcatagtgaagcaatcgtggctgtattcgatgggtcacataaaagtggaactgcaaactgtattgcgtatgctcggaatcggtatttaggtcaccaattgtggaggttgtatccgcaagttgactttgatctagatataacgtacttagcgtaagggggtcatggttaaaaatgaaacaagatattgtaaggaagtatagggagtttagtgactacttaaatagcattgatttaagtcagttatgttcaatgtacagcagaaaagaattgcaagaattaaaggacacactacataaaatagacataagaagcctcccttatgagctgcgtacaaaaatagacgaaatgaagcatcgggagtatccacagctcttaggggtttatcgataccctgtaattaatgagattgattttttatcggatcaggagaaaacagatcttgataaacacttggggaggctccgggtgaatgatccggttttagggttatggagggcaatacgggtgcaagagatgcagacaaaagcattagattggttggcagatagaggagtacttactagggtttatgaggtactctgtccggattgtttgggggagcctgtatctagacgtttatctgcagacgaaaaacttaaattagagaaagaatttacggagtataaaaagtcggggactgataaggactatcacaagttacaaaaaatcattaatttaaactgtagagaatgcgaagaggaagaagatgaactgaattttttacatgttgaaaacttggagtttaaaatagagtataggttgaggatagaaagggacaaaagtttagattatgtatgatgggcaactatttgaccggtttgaggtaatatagtatgatgcaagtagcttatctgccaagtgtagaaggagccaggtggatttcgtaatgcgataaccaccctttattgcctacctgccatgtgtaggaaaggaatccggttttcgtaatgcgattaccggtttttaattgatatcttcgacttacttaaagtctgtcgactataaaggtttcaatcgctgaacccgtaatcagcgtaaggaaagtctgcgtatagcaggcttttttattttgtaggtatacctatagatgttttgggttctttgttactggatcagtattgataggagtcaccgaaaaaaccacagaaatattatgtatactgattgtattcatgaatcggattttagattttattgaaaatgatcataggtgaaaattgagaaggttattcttgaatgttgtgtagggagtgaattagtttgtcagaagtaattgagaaaattgagattagtgaagtactgggagaaaaatttggaacatattctaagtatattattcaagatcgggcattgccggatgttagggacggattaaagcccgttcagagacgtattctatacatgatgcatttaaggggaaatacacaggataaaccatataggaagtcggcagcagctgtaggggatgttatgggtaagctacacccgcatggtgatagttcaatttatgaggcaatgtctagaatgagtcaggaatggaagatgggaatgactctagtagattttcatggaaataacggatcaattgatggggattccccggcagctatgaggtatacggatacaaggctacagaaaattgcttcggaaggttttatgtctggtatcaataaagacggaattgtaccaatgattaataactatgacgatacaatgaaagagcctgtggttttaccggcaagtttcccaaatcttttggttaacggtgtatgggggattagttcaggttatgggacagatatcgcccctcataactttacggaggtattaaagggttgcatacttcttattaacaatccagatacgacattggatgaattgcttgaagttattcccgctccggatttccctactggaggggttgttgtgggcgccaaacatttgcgggacgtatatgcgacaggtaaggggaaaatcgttgtaaggtctaaatatcatattgaaaaggacaaaaagagaaagtatatcattattgatgagatcccttatgatttaaataaaacaacgttggttaaagatctgcagaaggttgcggatagtaaaaaggttgaggggtttattgatgctagagacgagtcagatcggaaagggttaagagtagctattgagttacacaaagatgctgatgaaaacattgttttggggtatttattcaaaaatacgcagctacagaaaaactataatctaaacatggttgcggttaaggataaaaaaccaaagttattaggtttacgtgaaatccttgtagcgtttaatgatttccggatagaaactagaactaaagaattgaggtatgacaaaaagaaaaccgaaaagagattacatatcgttgaagggttcattaagttggttgatattctcgatgaagtaattgcggtaattaaagagtctgatggtaagtctggggctaagaaagatattatcgatgaatttgggttttcagatgaacaagctgaggagatcgttaaactccaattatatagaatatctaaaactgacaagaaaaaatatgatgatgaaaaagagctgctgacaaaaaaattaaatcaaataatcaaacttttagaatcgccagcaaaattgagaaggaatattgcaaaggggtatgagaagttaattgagaattttggtgttgagagaagaacagaagtagttcaggaaaatgaatcatgggatgtaactaagaaggatattgtaaaagaagaagatgtttatgttggggtctcaaagggtggatacattaaacgttctagttcaagaagctatagttccgcaacagcctgtgggttagttgagggtgacgaactgttatttgaacaaaagaccaatacaaaacacagtttgctattgttcaccaataaaatgaattatatgtacattccagttcatgagattgaagaagcaaaatggggtgacactggtaaacatatagcaagctatggagttgatctaggtcaggatgaaaaaatcgtcactgtgtttacggttagtgacgaggataggaataaatatattttaattgcaaaaacaaacggtcaggttaaacggacagcggtctctgagtatgaggttgttcggaagttctttaatctatatatggctgctaaacaaaaggacaatgaagaattagctggggcttggttagtcggcgatatcgggtatatagcttttgaggataaagatagtaagagaatgtatttcgcaataaatgaagttgcaccaacaggattaaaaacaaagggtatgaggggtatacatttagaagatgagagtcggggtataaatcaagttatcttctgtccgacagaggaagatataccggacgggtacaaatatagggaaagagggaagaaaggttgggcgtaatgcctagccttttttctttgtctaaatacatagggatagttaacagtattggatgctgaataaacaataaaaagacaatccatattcggcttaaatatataaacaaaatctaggggtgttagtgtgagaaagtattttaccgaggtgtaccgggtgataaatgaaaaaaccgttgaacttacatttgtaatgaagagtaatccgcaaatcataccgcttagggaagttcacttacagcaagcaaaaaaagtagcagcgggcggagggtctgatctcttaaagctttacgaggattatgaagtagtcaatccagacaaattggagaggtattctccatacacagtaatgtatgaccatcaggcaattatgggattggtgttgttaaatgagggggatcgtctagcaagggttatcgtggaaaattcaattgatggtgacgagattacaacagatatcaacctaactttaatcggtatttgggatggttttgcagtacaggtacacgagacactgtcagctaaggacgacgaacggttaaaaaggattttaaatgagagagctatggatttaaccgggctactggaaaatgtattcaaagccggaatctttattaagtaatgcaataagaagattatcttgtgtgggaggtttggggggatatgccggatagcaagtttttcagaaagtagataagtactgaaattgtggaataaaaatagtgttataagagaagatatctgctggggcaggttattatttgggaggtttatatgaaacagggagcaaaaattacagcatcggttgcattagcggtagtcactattgcagcgataccagtttatgattttttcatcaaagataggttaggtacagaacaagttttagtagttaaggaagggcaaactgttcagaaatcagatgtgctggacaataataatttagtcattcaaagaagaccgaaggatcaaattccggacggagctattacagctgatcaagctgacaaaattgcgggtaaaaaggcaagtgcagttatttcaggtaactccgtactgtctaaggacattgtagactttgacgatctggttcctgataagaagaaggatgaggcaatccgacctttaacagaggatatgttgtttgctaaaccaggatctttacggagaaacgatacggtaaatatctacgctcttacagagacacagtggggtaaggttcatcacgaggaggacaatacttccggagatgggtcaaaaactgctaaatccacaagtttaacggatgcagacattcaaaatagtaatgatcctattttaaagggagttaaagtagcgtatgtaaaggacagcagcaataaagaggttcaaagctctacagaagatggtggggaagctgcggctagtaaacaaaaacaatctaatagtgatcgtttaaatgctacaagcaccatttctgaattggaggtcatcttgagtgaaaaagatttccaaaaattaatgacacaaacagttggcgaaggcaaaaagctttatattacgtaccagtaagagtaagggggaagttgttttgaactttgttttagttagtcgggatgaagagttaaaaggtgtattaaaaagaggtattccggagtatccagatgtgtatgtatttgattctattgatgatgcatccttagcggttaaggacgtagctgtggtgctccttgatggtaagtgtgtagtggcagatgattttgagaaggttagacaggggtatccggaaacagaaatcatttacacaatgcacaacattaaggcgaatgttatatctaaacatttgcaaatgttagctatggcgcactcagtagatcttataggggagcatagaacagcggatcagattgtaaagcaggtaagaaaaattttatttaaagaatctgatgcttcttctagacgaattgtttctttctttggaactcattcgggtgcgggggtaagtacaactaccttaaatatctcaaaattgttggggaataaaattgcgggcgatgtactattgattactctaaatccatgggattccggagattatcattataattacaaaaagaagaatctaaatgatcttaaagtcgatcttaggggaaaatcgttaaatccggagagattaaaggatgcttgcaactattacgataaaactttttatcatctagcgggtaataaagatattaagctgcagaggtactttacgaacgaggagattgattatttattgcatgtagcactaaaaacatttgagttagttattgttgacggtggggcacattttgataccgctgcaacaacacaagcgtatattcaaggtggttcaaggttcttgatcactacacaggagcaaaaagggtatcgtgggaacttcccgcttgtttttgatcagttaattaaacctaccgggggaacatcagaagatttcggacttattgttaatcagtatgagccggatagcaatctacctagtgattctgatatctcttctgagttaggtatggcgaaaattgttacaatccccgatgtaggaaagttaagtaaaatcgcttcttatcaggaaaaaatgctcgtggacatggggaaatccatttatttagagccgctaactactcttgcaaactacattattaaagcatccggggtgaaggaggatgtgagtgaaaaaagcgagaagaagagttctaaaaaaagttgggcgttatgggggtaaaaaggtatgggtttaggtaccaaaacggtttctagtttagaggaagtgttgggtttaggggatccatttagttcaaagagttttattgatgaggtaaatgagtccaaaaaacttcaggatgatggtgtagggggtgaggtatttgaatctcatcccgaatttaaaaggatatgtgcaattgttgaggagaaaatgcgtgaaaaagctggagagtctgtagatgacggtggcagtaaagaatttttagagcgtcaacataaagcggttattggggatccaaaagcaattgattcttttatgcaagagatacagaaaatacttggggacaataacttgagtactaaatcgtttccagatatttttgaagatcttccgacagcggtatttcatatgatttggggagtggggatcttacataagtgggataagatgccgaattcggaggctgcagttattcgtggaactcagttatggatagatgtaaatgggcggatggaattgcaggaagagtcatttgaaacgttagaagaggttgagagggtaaggaaggtgtttttgcttaaaaaagcggattccgtcatcaacagtcaaaaccctgaattagaggtagaacgtgaagacggtacccggattacaatgactcagagtccaaggtcattggaacattacattgtatttagaagatttgttgttaaagaaacaagtcttaaaaagcaagccgaattaggaacaatacctatgagagatgtacctctttatgaggcgttttcaagggtgatggctaacatcatttttgctggtcgtgtacgatctgcaaaatctacatttttaaaggctatgattggtgccagaccggatgatcacataattgctgttctagagaaacaccatgagttggctttgtctaaagcatttccatccagattaatttatgaggttcaagcaaaagagggagacttacacaaagcagtacctaccttattgcgtatggaacatgattctcttgttgttggggagatcaggtcattagagacagaggcttatttagaagcaacagagcgtggggagcggggagcattttcaacctatcacttaacggatgttgaaaatgtaacacagcagattacccgacacttattagatgagtttcctaacagggattttgacaatgagcatgctagggtggcacagaacatcgatcttatatttattcatacatcagaaagggatcgacgctctaaacggttagttagggtaacggaaattgtttgggatgaaggcaataaaagggtaataactcaggacttaattcgttggtcaccaattaaaaagaaatactattattcgtcaagtatatctaaacggttgctgcttctaatgttagagcaaaacgaagaagaaacaaggaagttagtaaggattctaagcgaacgtgaaagggaatctccgttatctgaatataaagatgaagagtacaaaatagttgaagatttgctaggagaggtgagagatgctgaatttattgaatcttgaagatctagggatatggcttaaaaattcaggtgtggattattttctttacaccctccttttcttggcagtccttttcattacaatttcggttgttcaagagcctattaaaattaaatatcgggattggaactatcgagttaagaggacacaacaaactcatgtagaaaaggcattggagacattagaggaagaaagtattgttcagaatatatctctaatgctaaaggctacagcaaaaaaagggaaagatccacaaacattgagtacctttttcattatatcttttctttgttttttgtttgtgtttgtcataatgtttgttgctgtaaaaatggttattgtttctttagcaatagggttactagctggatgcattccgtatgcagttctagttgcaaaacttaacagtattcgtattgctgtagggaatgagtttttacggtttattcaggtattctcacaacaatataacgctaacgggtatgacattcagtttgctttaaggtccacattaaatgagatgcaagataaggatatgaagaaagcattaacccagttgattagtgatttgaatactaatagggatgaatccggtgtacgtaaagccgtacaggagtttgtatatattaatgggtctaactggtcaaaacggttaggtaacattctagtcaagggttatctagagcaacaaaacgttttaaaacccttactgttccttgtaaaacaggtagaaaaaactgaggaaatgatagcggcagaaaagtcagaagtgatgtcggttgctattgaagggtatatgcagccggttatactgattggttcattgggtttgggtgtatatacatgtaaaatgcagggttggtggcagttacaatttggtgagcatacccctttgatgttactggcttttgggattgtaggagtaattttttcagtagttgtaggtcttcttgttcaaaacattaaaaacgatgtataggaggtgatcaggtgttaatgttgcttacggtttttgtacatctaatcgctgtttcaggggctatagggtctggaattttgttttactccggaatatcgactcaggaggagttaatgctgggtaagttcagaatccagcatgaatttgttaagcgggttagaagacttaaagatgagaacgaggagtccaagcttgaaaagattttaaaagatgctggttatccatttgggttgaatgctaatagatacaccgcgatttttattggtttgatgttggtaatcctagtcgcttatgttgttaccccagcgtttaggggtgacggttttaatctgtttggtttggtgtctgtcgtcgcagtatttcttattggtacaccagatataaaatatagtgggtttaacttcttgatgaaaaaagtaaaggaattaaaccaagcgaaaatacaagcagaagtttttacattttatgagttggcattaaatgaacttcgattaatggaaaactctagaattcaggcgtatacaatgataagggatctggcaccgaacttttcaaaaatggcaccttctataaacatgctcttatttaactggaatacggtcggtcatgcatctgctttagatgcgtgggctaaagaagttggcggtgaagaagctagagcgttggccagtgtattcaaaacattagacgtagttgacagggatacagcaatcaaaagtcttgagggtcaacaagagatgtttatgaaggctcaaattgaaaactttagacgacgtattaaggtgaaggcggatttagccaaactgcctatcatggctacgtttgctttgcttatggctaactatctggctgttgtagtgattatgtgcctaaacctgttaaattccaatatgtaggaggtgggtaggcgtatgagtaaaacagtacagatattgttgggggtttcagctacggtcggggtgattgttcttgttatttatggaaccatgggagatagtttatctgggtttgccgatcgtatggcagaatttttaaatatgagttaaataggggtgttaaggtgagaaagagtgttgcagttctgttaatggttgggtttactgcggtattctttgggtctatgtatcttgggttagtagttaatggtgcggcagcagataaaaatgaccggtatcatgacacattcaataacgatcatcaggtggaaccaataaataagtagattgagtgatagtaaaagtagactgaaagtaattaagtatttagggaataaagtataaaaattaagaggtatggactttaaacaagttcgtatcaaattgaagggatgagtataggtaatgaaaaaaacagttctaacgtttcttggggtagcagttggggtagcagtgtttgcgtcattggttgtcggattgttgcaacctaacattgagtcaaacgctaatagcacaaacacaaaaattacaaaaacatttgaaacaattaaataaacggttacgggtcgaggttaatacctcggctttttttatgtggacatcagtatagatagaaagggaaatttatttgaaagaggtaaatgtaagggacggcaaaaggttatttaggagggtaaagaatgagtgaagcggtaggtaagtggttaactgtatttttcgcaatgattataatatctacgcctattatgttttatattgatgattcccataaagaggcggttagcattgtgttgaatgagggagcaaagagagcatctattgacggagggtatacacagagcacgattaatgatatgaaatcccagttagaggacaaatataaaattggtagaggaaacgttagcatttcagcggatactgggtctaaaaagttcatgaggggtgagtatattacagcgtctattaccatcccgagatccccaattttccttgtcgatatttttgctaaggggaaagcggtgtctagttatacaaagactataaaagtgatgtctgaatatcaagaaccaccaacattaaacgattaggtggaggttaagtaaatgggagatacaatacgaactatatttttaattgctgcattttcaattcttatggcgttccagattaatatggctgcggatatacgaacaacacaccaattgaagaatggagcagagatagcgatacatgatgctatgttagcgtataacaaagaggagttatctaagggaaaagttgtttttaatcagacgtatgcaaaaaagtacttggtggatagtttaaatgccaatttgaagttaacaggaactgctacgtctactacactttatcctaaaaaggattcattttttacgcagccagttaaaatattaaaagttgtgtttgtggatgaatcaaatactagatcttttccttatacatataaggatccagaatatgatgtaacgcaaatattaaaacgaccaggtatagtggcaattttagaaacaaaggcaccaaggtactttaaaggcgaagatacaattgtgaggcaagcaacatcctttgagtttcaacagagttgggttgagaactaaggttttgatagaaatagaggtttagatagaaacaaaatgaacgtagggggaaagttatggtgggtaagggagagaaaaagaagaaatctaggtggttagttttaagtggagcggctgcactaatattgatcgcagcgggttgttgggtgttttttgcaaagtattatgtaccattaaatgtttggaaggaaaggggtgagatttatgagctacgaaaaaacttagaggtgttgaataaaaaagaggatgggtttgtaagaaaagaagatgattacatcgccaaaactccggatagtacaggggagtttgtggatatggaaaagaaggtaactaatctatttccaatgtctattaatgctccaaaggattatccaactgcttataaggatgcggttaagtgggctaaagatctggctgcagggaaagtgagaaaagatgatacaataaatcattttcttacaaaaacctatgtagaagataaccagaaatataatgtagggcagccgatcgttgcggttaaggaactggatacgttttatataccagacgcctattgggggttatatgatgtagcagctaaagaaggtgcgtatcaggaatctgttcaggtaacagctttttggtacaacaaggatacaggtaagacgacggggtgtacatagggttcaaacctaacccgggtgcttatcagaatgtaaaggaggagtagtgttgaaaggaacattgaaaaggaatagtttagtctctctctccttagttgtagtattaagtacggcagtgtcagctttttcaccagtaggggttaaaacagcgagtgcagcacaaacagtatccaaaacagtgacgtataaagggttaagcagtaaggatcagagtaaaatttccccacagacgataaattacaacgagaatggacacacgggaacattaaaaataactaatgtggagtggacaccggagtataaaacaaatcgaaccacgggaacattaactaaatctgaaacggtcaataagtatttggatcgtgagggaactccaagttttgcaaatacggtgagttatacgtataccgataaagaggacggaaacaaaaaacatacgtttactctaaataaatccggaagtccagttaaaacgagtaccacaactggggatgaaatcgtagatactcagggcgggtacatggctatgctgcaggatgcaaaagccaacaaggtaaagttccacagccggttaggttggttgtcgaatacgaaccaaaagtattttgggtcgaatacaggggacacctttgttagcggtaagtattattttaaggattctttacccagcccgggtgcgggaacgaaatggaagaatttaaagccgggaacaacctttggcgaggcttggggaagagaaaaagaaaaatggacggttacaaaataccgatggggagatagtagaccttattccgctcgggaagtgtacacttctttagggaaaaactataatgtcagccggcttaaatggaatggaaaagacggggacatgtattattcaagttcatttggtgactacatctggttagcttggacagataatccgaaagatgcgttaacgagacacaatgaataccgtaagggagcagatgtaacttacaaatttaccggggttaaatataataactggaggcaggattataaggggaacctcaagcttcctgatataattacgggttatactgccaaggttacttacagcggaaaggttattgctccgccaaaggcagggtttaacccaagcaagaacccagctacaagacttgataaggtaacgtttacctccacagcgactgatcctgacggagaaaagttaagttatacttggaacattagaaaaaagggaagttctagttggggttctatgattgggtctacttccgccacttatgattttacaaaagagggaaaggcggcattgggtgattgggaagttaaacaaacagttaagaatgaaagtggcttaactgatagtgtaaccaaggttataacagttaaagctttaaaacctacagctgggtttaatatttcaccaagtacgaccaatcgtttaaataaatatgcgattacatcaacagcaacgaatccatatgcgtctgaacttacgtataagtatgaaattaggttaacagatcctagttccggattcgcagctaattcatggaagagtttatcatcaaataaatctttttccgctcaaattaaagagttgtatgggacaaacccgtcgaatacttatcaagttcgacaaactgtaactaatgaggatggggaatccgatactgcactaaagacgttaaaaatagaagatcttgcacctgttggcgggtttaaaatctccaatgtaaatacgtatattaacgatacggtgagtgtgacgtctactgcatcggatccggagaaagatgccattacgtacttgtacaaggtgacaagcccttccggtaaagtaagtgagtataaaacagcaaacttctcgtataaagttactgagcctggggagtataagatttctcaagtcgttactgacgtatatggcttaaaggggtcggcggaatccgcagcgaatggggtagacttatcaattaaaggtaaggttagccatacaaaagattgggaagagaagcatgctgaaagagtgaaaaatggtattgaaaaagaggggattttctacagtggagagcagtttatcttagaggcaacgaccactactgcagaggtatcctcagtttatgcggagttaaatacaattaacgatagcggtaaaccggttaaagttaaagtaaaaatggtgcaaaacgaaacagataagaaaaaatgggaagcggtaatggagcctagagatgaatggttagttgaaaaaaccagactagctaaggggcagacaccatttacattcactgcaacctataaaaacggtacggttaggagtacagtggttaatatagaaattgatcgaattgttacaacgattttagatgtgcacaagaagtttggaatataatgatgataatcagagagggctgaggctctctcttttttggtatactacagaagaagaaggaggaggtctggtgcagcactattgggttggcttttgtttattaaataaaaataggataatgatagatgtctgtttagagactgaaactggtgcagactttaaatttattttacctacatccggtggagatacaccttctaccccttgggttgatatagatgactacataaaagaaaaatatcaggtctttccgaggtttgtttttgatgaaaagtttaggtttgatgaaaatagtaacaaggagctttatgcgtcttcttatatgatggaacccgggacagttttcaggttagtttcggttaatgataaatctaaggcaagagtggctagaatcttacttgagcgaaaatgggtaggtcaaggacagtttcagttggggtataccgtaatgaattacaaaaagattacgggagatgaagctgacgaaaacgagtttgagaatttaaacgaggctctgaagaaaaacaaaaataaactgatgaccgaagttaataagcaatgtagcattctggagaaaactttacttgagtttgaaaaataaaatcttgatagtaagcaacaaatgttaacaatgtatttttgttaggataaatatagatttaaaatttaattattttttagggtttaagggaggaagttaggtatggcaaaaacaagtttagtagaggttattgggttaaaaaagaatacagggattgatccaatcgcgacgttttcaactaaggggttagcaaattggcacatcaataacacgtttggtgatcgtggattcgataagctgttaactcggaatgtttctaaaaagggagaaaactttattccggatacgttggcggaggataaaaaccaatatgtacatgttaaagcaggaatgaaatcgtatgactgggatacgttaaatatcagtgtagtaaaggggacattattagggttctatttagacggtttagttaagtcggaaaaaacgattggtaaacttgggacagcagatttcgagggagatgaggcgcaagttagcgtagtattggggatgaatgatcctattccttataataagctatctagtgcgttagaaaaggtaattgttgaatcgattgttggtgacactgaggcagcggcagcagtcgaagatgaagagtctgaggatgtagtagaagaacaatctacaccagacgaagataatattgataatgatgacgatgatgaagctgatgaggatgatgaaagcgagttagaggttgttgagtatgaggatgatgacgaagtcgacgaagaggatgaggtcgttgatgaggatgattccgaattatcagatgatgaagaggctgatttagaagaggatcttgatggggatatcgatgattctgaagaggatgatgactccgaagatgaggaggaagatgacgaggaggaagagtctgaattagaagaggatgaggacgaggaagaatccgatttggaagaggacgacgaagaggaagaagatgaagaagagttcgatttagaagaagaggatgaagaagagttcgatttagaagaagaggatgaagaagaaggtgacgaggatctagaattcgatgaagaggaagaagatgaggacgatgaagagagtatcgaagatttagatgctgagttagaaaatttagatgtggattaatagaagcgggaatctcccgcttttttcatataagaatgtttaggggaactctgagtggggttccctttttaaattttctggatacatataatcaattagaaagatgatcaatttgttacagtaaaaatagaggggaggggttgagcgatgaaaaaagtaaaaagtttttttaaaaagggttgggtacagtggtcgataatgtcggtcattattttgtgtggattggtcattggtattttaaatattgttcatcaagatcaagaaattaagaataatgatactcaaaatgtcttggggaaataatgacttctctgaaattaaaaagccaagtatagaatcattatcaaaaaacacgaaggggttaggtaaatagatgatttcggcatcagaggataaacttctttatgatcattctgaaactatggatattgcatttggtgaatggtataggagaaataaaaacagtaacgcagtaatcacaccaactagtataagatctgatccaagattagaaaagctgattaaagttatcttagcagaagctattgaggttgaggctacggatatacaaataaccaaccgtgaatcatacggactagttaggtttcgggttggtacgaaaatggtggatcataggaagattcataaggatgccatgtacggtttaggggtagttcttaggtcaatgtctgatgtaaatattgaggagattaataaggcgcaaattaatggacggtttgcgtatgatcacggtaggagtaggtatgacgttagggctgcttttataccaagtatcggagggcagacaatatcgctcagggttctttattctaaccgtctgggcgggaatattgataagctggggtttcctgaccaggttagtaaaacgctaaaggaagttttaagtttaaaggagggacttatttttcttacgggaggaacaagttccggtaaaacaactactttgtacacgtcaattaggcatataatcaacaaaacaggtgctactaaaaatataatgactatcgaaaatccgatcgagtatcaaatagatggggttgagcagtcgcaaacaaatgacattttaggttatgattttgcaacggcattacaggctttgttgaggatggatccagatgtgatacttgtcggtgaggtcaatgatgaggggactgcaagggctgcagtacgtgcggcgtcctcggggcatttggtattatccacattacacactagtgatacggtgtccgttaatcaggttttgaggtactatggcatttctcgattggatatgggtaactcactgcagttggtaattaaccaaacgttagaggagaaactgtgtccacattgcaggaaaccgagggcggttacatcatcagaattaaattggatgaccaaacggttaaagactaacgagcaaatagttacggtttatgagaaaaatccagtaggttgttctgagtgtcaggggtacgggatcaaggggttagtacttgtggttgaaatgctagatgctaatcatgtatataaaaaggctttagatgattcacaagaggatctagacaagttaaaagagatgttaatgaccagggagtttgcaaatttttatccaaaagagtgggatgtctttaggcatttacagaaggggaatatagatatggctacagccaagaaaattttacgttaggggtgggttaatgttttttaaaattatgtttatgtatgggttttggtttacttgggtgatttttttagctgcatacgttttatttatgtacggtcttatggaaaaaagaagcttaaagggtgctggagcagcgttcgattcaagttttaaacgtttgtatagtgtctctattattcagttgatgattgcagttgtgttggtgtttagtccaattattctggggtttattcatgttcattggtattggatatgcaccggcatgattacaacattgtttattggtggaaccatgtatctgtttatgaggtatgctgaaaacctatcagataaggattcagcggagtttaagcccaaaaaacaaattggttcagatcaagcaattgagaagctctacaaacacaaaaaggtattctgggtatatgtagcggtggtgttgtttgtttatatttgtatcccgttagatgcgttcaatgtcattaaaataacaaattcaataatgcccaatatggcaccattgtatgtatttatgttgtcggatgtaataaaagtattgtgtatggttattgctaatgggttgctcataatttcggttaggaaatatttgacggcgtactttatagctatggggtcaacacaaaaatagaagcaatgatagagttagatattcgaaatggggatattgtaggaaacctggggaagaggtaactgattgtattgagctgaaataggtcaaataacatacgggtttagtattatagtatagggtttagggggacttaacgtgattgtgtacgacagtaggacaggaacaactaagagtactgcattgagagtaggtaatgcattagggttgaaagttaaggatgtaagggattttgaaaaggaagaagttacagaaccatttgtattctttacatatacgatgggtaagggagagacaccgaggagatcggtttggtttttaaataagtggggtcataaaatgatggctgtagtcgccaatgggtcaaataggtttattccagtaggattatttgcaactgccggggaaaccattgcaaatcagtatcaagttgaattaataaccaagttggatatgggcggaaccatagaggatatgagcaagttggtaaagagaatcggtgagcttcatgggttacaggtcggtaccggtcaggcagcgattaaaacaggatcacagtttaaaaacgggcatttcaagttgaagatgttagttagtgaataagggggttcaagaatgtctgtaaaaagtgcagtagagaaatggaatagtgattatttgcgatataacgttttagcgagtgaaaaggatgagatgggaaggtatcaaaccgaacatgatctcacggcgttaaaaatgatcatagaggaagcaaagcaggctacaatgcgatttgaaagtaaaaaacagcgtatggagtttatgattcgcaacgggttttataaagaggatttgttacgaggagatatcacttattcagatattgaagggttgtataatacgtataaaaagcacgatagaggggatattgcttttatttctcaactggtgtttctcagctcaaattatgcgtataagttattagaaagtgaagtggaaggtttagttgaggactggcagttaccaccgaaacgatatgatgacaaatacattctaatggaagataagtcagatcgagctgtagctatagctctagaggtgtcaggaggaaaattagatctggcacacgatgtagttaaaggaatggctatgaggtcttatcatccagcaacaccaacctatgcaaatgcgggggttaaaggtgacggtcagctaacaagttgttttattttaaagtttaaagatagcttacagtcagtagcggatatggattcatatactatccatttaagcgatatgggtggaggtattggatttgatgcaactgatgttaaagctgttggggaaaaggttggaaatatagataacaggtctattggcgtactccctcttgctaacagagctgaacaggctttatctatagctgtgcagggtggaatccgaaagggtaatggtgtatttttcttagatgttttccacccagatatttatgccttgcttgatgcaaaaaaggaaaacacagatgaaaaaacgagattaagttttctttcagtaggcgtaattatgagagataaattcatggaactttttgaacagggtaaagattattatgttttttatccgaattcggtgtatgaggaatatggtattcgtttatccgatatcgatatgaataaaatgtatgatgaactggttgcgaatccgagggtgcggaaagagagatacaataccggagactttatgaatttgtgtgctagggtggcgagtgaaagcggatatccgtatttcatgttcagggagactgtaaatgagagtcatgtgtttaagggtgcaatggtctattcatcaaatctttgtactgaagtgttacaaagacaagatgatggcaatggggttcaatgtacattagcttccgttaatatcttagagacaatgaaaaataaaaacattgctgagacagtaaggttagtgactcgacatttaaatggagtattagatcgtggagatatgtcaattgtaccggatattgaaaaagcgagattgcggtttagagccattggtatgggagctatgaatcttcatgggtactttgcaaatgtaggcattccatatgagagtgaatacgctattgattttgtaagaacatattttatgatgatgaactactattccatttctacgagtgttgatttggttgatgaatacggcgtgtttgatgagtttaaagatacaacttacgcagatggtacgtactttgataaatacctaaaaacagattacagaccggttacagatagggtcaaaaatctattcaagggtgtttatattcctaccccagaggattggaaaaccctgaaatatgtggtacagaaaaggggtatggcgaacgcctatcgtatttgtattgctccaacagggaaaatcagttatttatctggggcaacacaaagtgttatgccaattacacaacttgtagaaagtagtgtaactaaagattacaaagcatttttcccgatgccggggttaagtcaaagtaattattttctatataaaaatgcgtaccgaattgatgactttaagatgttaaaccttattgcaacaattcaggagcatgtggatcaaggaattagtactacattgtttattacaagtgagtatacgtcatctatttgggctgagagagttctgtatgcgtggaagttagggcttaaaacattgtattatgcaagacctaaaaagacagtacacagtgggtttagtggcaatggagacgatggtattgaggttagtaactatgaggagtgtgagtcctgcacttgatgcggggcttcaaagttgagggggaattagggtgaaaagaagatcaccggttaaggcgattagatggaatcattgtaaggatccagttattgtggaagcacacaaattgaatcaagctaatacttggacaacgggtcgaattagtgtcatcgaggataaagtatcctggacaaaaatgagcgatactgaaaaaagagcttacgttttaacattcttagtgctatctaggattgatgctgaacagggtcttgtaggtatgaatgcggtagcgtataacagcccggataactataccaaggcgacatttacatatcaatcaggtatagagatgatccattcacaggtatatcaccgggctttgacagaatttatacagttgtcggaggagttaaagttcacgaactgggctgatgattctagagaagtgaacgatgtaatcgagtatttaattaataatattgttgatgttgaaaatgatccagatgagttggttagttacttgttgcagcttgcttactcaacggtattggagaattatgtgttttatttattgttttataatccgttgtacgaagcgtcggttaagtaccgtatgactaagtgtgcagaggcagtaaggttaattatgcgggacgagtcagtgcacggatcattctccgggtacatcttcaaaaaatactggaaagaggcaacagaaatccaaaaagaaaaggttaattctaggtttgagaaatttttagatacactatatggacgtgtagaagccctcttaaattttatatatacagatccttttattattgaagatattaaaagatttgctaatttcaatttaaacagaacgttagtgaatcttggatttagtgaagtcttttctggggatgatattgtttttcatcctgcagttgaagccgaagttaagtatgatatggaatctactcacgatattttttcaatggctggggattcttattttatgatggactcaacggcttgggttaaggataatgttgaaaatgtgcagagaaaattaaaagagaagccagatttagttccggtactcagagggtgaagtgttgggtgggggtgataatacctccaccgtttttaatttgaagatgtgttaaatttagtatacatcaaggttatggagggttaatgtatggtcgaagtaatggataagaaaaaagaaattgtgttagccgtaagatctgatttattgtttgatgagggttctcggtttcaaggatttattagtaaggtaaggggacaacacttagtaaataatcttgctctagctgaggcaattactaggggagatgcggactatgatgaaacaggagattttagtggatataagcagctgatttcatatggagtagtaagggctaaagatacaggtagggtgtttgcatacaaacgacttgaaaaaagcggagaagagaaactcagagggttgggtagtgttggtattggtgggcatatgaatccggttaaggatgctacaaccattgaagaagtgttaaggttgaatacgtatagagaagttcaagaggagttaaatatctcagaaccgttggatgacgtcaaaatgattggttttattaatgatgatagtaatgatgtggggaagcgccatattggaattgtatatgaagttgtagtgagtagcgagaatacggttagcgtgaacgaaacagaaaatctagaggggtactggctaaccaatgatgagtttaaaaagattgacagtaatacatatgagaattggacagtgttactgagtaagggtttagtttagagacagtataaggggcgagagcctcttattttttatggaaagatatatttaaaggaaactccataaggtatacattacaaagctaaggtatggtggtgtaattgttcacgtatatactgtggggtttaataataggagttttaatacttgcagctaggggtttaggaagagctgcggttggtggggttgtatttattggggcactatttttcgccattttcatgttggatacctttacaacactggatataagacgttatgtaccaattatgttttatgaccaaacagtgaaggatccgcaaggtacagcagccgaggtaaaaaataaagtgttagctggaggacgggaagcggctaatgaggttaacgatgcggggaagagagcggatgagacttatggtcttaatgaagataaagaatggcacaataatgaggatgaagataaaaagaaaaaaacagaagaaaagactcggggaaaagtaagtaagaaatttattaggtatgacgatgctgagaatgatatcactaagtacttctctgacttatctgccaaggataaggatatttcgttgtcaatgtcgcctatttacaaaataaaaattaggggtgaccaggtgactgtatggaatacaggggacagcggtgagaacggtttttatattgagagaaattagggggtaacatttgtggaattgtttagcggatgggattcactgacggttatgactgtcaccttagatgcgctggtgttagctacattctttttcattgtgtttcgtaatttgcaggctatgagggtaacaggattgctcaaaggtgcaattttagtagtaggtatgtggttatttgctaggttgtttagtctaaagatgactgagtccattgttacgattatactgcagtatgcctttttagcggtcattattatgtttcccaaggaatttaggggtatgctggatcggtttgggagaagaaaggtatttagttggaatcgggacaggttaatttcaatggagagcagaaaagagttagttcgatcaataatggatttatctcggaaaaagaggggagcattaatagtcattgcgagagaggacgatctgcagcaggaaatagactccgggacattattgggggaagtaaacattaaaaaagaagttatagatctattattttcatctgatagcgagctgaacaacggggcagttattattcgtgataatgccatagttagtgccaattcgagacttcctattgttgagaatcaacagttacaaaggtggggagcgggatcaagacatttgggtgcagtgggaattgttcaagagaaagattcgattgcaattgctgtgagtgcggatactggaaagataacattagtgggttacataggtaagaatttaagtgtcgatcttggtttagagttaaaagaatttaatattcaggcaggagtggatgaacaagcattattaatgcggatcgataagctaattcaaggtaagggagatagcaaaaaggtgaagagtaaaaaagtgaaggataaaccaatgaatactaaaaagggcaagaacaagcccgaaagaaaaaataaaaaaggtgaggataagtcaagtagcgggttttttagttagggggttttaggttgaaaagatctggtagtgtgtttgctgcattgtgtttaactgtgatggcggttggtttaatggtatataacacatatggaggagctgaggaatctgaatcagagttaaggaatatgtcggacaatcaggtataccgggttgataatgttgaggtagatgtaaaaaccagagaagggtatttggctgtaattaaagaatcgcccaatttaatcatctacggtgaccaggaaaaaataaggctattaaagaggaaaaaacaagttccaatagtaacagcagatacagatgggcgaaaagatggggagtactggttatcgccaatggtgaatgatagggtggacggactacactacgttattaaacccaataaagttaaagtaaatgtaattaagggggttaaagagagtgttaaacctaaagtcaaaattgatggccaactacctgtgaatgtgaaggttaagagtactgatgtgcaaggtaaggtgtccttgcttatgcttccctcgcaggttgatattcttgggtctgttgacgttgttatacggggcgaggacattaacaagagtggggtaatacgaggagacgtagtagttaaggatgctagaggggatcagttagataatgtacaggtgaaccaaagctccctcccagtaaaagttgatattgaataactgtttgggcgtacaaggatatatttgtacgccttttattgaaagttaagaagatatgatattttaataaacttttatgggggttctaagtagagggagtgacaaaatgtcaaaaaacttttttggtgaagcacataaagtatctaaaaaaattacagatctggttaggtctaataaggttatggttctgttaaacgaggggttatcagtaaactgcaaccgatggacagtaaataaagaagggaaagtcagaaaaataagtagtacgttaagtatgatacatgcatctgtcgctctacgagggttgcgtgttcaggggatgttatcgcatgaggacgggtacctggttccattagttgatggtgggtggttaagactcatgttaaccaaaaatactccgtcagggatgacgttgtatttagatgggttagcttatgaggtaacccttaatgacggttgttcgtatagtgtaaacgttgggttctcttcaaaggttaacggtgaggatgaaattaaattaaagatgaaaatgggtcaacagacaacggttaggtatgaataagtatagggggggtaatttatgagcaaggtttgggattacggggattttagtgttgttgatatgggtaaggtttgggggcagagaattttatggattagtgtaggtgaaaatgggtttgagtttaacgtggatagtgacgtaatggggagtagagtcgaaatagtggatagattagttcgttcatatgaagaaggattagatatgttaggcggatgtcgagatataaaaaattcgtatctaaaagaaattgaaacatttatttctgattttgaaaaaacttttagtaaggtatggattaatcagcataggcttaatacttgggagttgagtatggttggatgaggctacagatgaaattatttgggtgccagatggcttagtgaggtatgttgatcgtgttatagaaacagaaaggttgttgtttcgtgagggtattaaaagagggataatgaaacctaaatctgtatacaacaatatttataatctagtggtcgaattttccgatttagtgcggatgatgaattggcgaatagcttatgggtatataaaggtttctgattctaagtatttaagaagttgctttctgacgcagggggataaggttatagaccccgggagtttgttttttcaccctgttgataacgaagattattatacattcacagaacttcatctagtagagtatatcgatttgcttacaggtggattagattccgggttgccggcgttaaaagagacgttgaaaacaagggaggaaaagtttaaagagtatgctaatgagagaggatgggattgttatgggtagagtggtttgggtatgagtataggggatagaaatgtgaatggttacggtatcgaaaattatggtgctttagagaataaaatagatgatattaatagtgcagtgaaggggataaatagaaatgttgcaaggatagcgggtatgcaggagagcgacaccaagaggggtaaggtaattgaagaagtaagtttgagggatgcggttattagggttaaggagtatagcagcagttatgttggggatttatctcttgcaacaaatatttatcacgctcaacaactggggatgaaacttaggcagcttgaagttgatttgcacgggggaacactggcgtttgatggtggggcatttcaggaaagttcgggagacataagattcgggaaaataagggctaatccaaaggagattatacagggagttattcgaagagcgaatgaagaaacatttttcagaccaacggtgtctgggaacggtacggtttcattagaaagcagctttaaattcattcaattgctacgatttcaagaacctaaaaaagttgtgttagagaagggactctatctcgcaagtgcaggagattttaaatttagaacaactagaaatttcaatctaagttatatgcttttttccgccaagtcggtttttcagacagacgttaggggttcgggagttattgctttggagctgccagtacataaagatgagttggtaaagcatatagtaaccccagataaaccgtatagggtaaacggagattatgttctttattgggtaggggatcttgaaagaagggttaggaaatcgagttcaatatttggttcaattgctagtggtacggggctggttgaggagtactcggggagcgggtatgtaataactgcaccaactttagggtattataaaactttatcgagggatttagctaatacgggttacggggtatctgatcgtacagcagtcgtaggtgaggatgctgatcaaggaaaaagaaaaacgccgttactgaaaaaaatatttacaaggcagtgaataattcactgctctttttctacaccatacttgacaatacaatatataaatagtataataatattaataatataaacattgatactactaactttcttaaactttcaagagggtaggctgaattattattttaggcagtatcaaaaggagagataaaagtgataattgaaaacagtaaaattagaaatcgaacatatagagaagatatagagtttagacatgcattattggataagcactcacagttaatgcgtatgtaccgccggaataacaatattaaattggcaaaagaacagtttgagatcgttaaatctcttttcacctttttgaataatgtaggcgaaacaatgtcttattatactttagaagattttaaaagtgattctaaacaatttgaaaaaatatcacggtcacatgtggtgatattatgagagtagtaatatttatggatgaaggaaatattcagagagttgtatccgatgaaaagttagatgtaactataattgatcaggatgtggagtattgtgaccttgatggagtaaaagaaatcttgggtaaggaagcttacgtatatacgggaataactgagagtgatgtagatcctgatttggttagtagagtagaagaagataagaaaagttaggaataggtgtagggtacttagagagggtggggatttcaccttcttttttatttttatttgacatttaaaatatagtatagtatagtgaatttaataaaaattaatgtaagagaggtgaaattgatatggattatagcttaactatatctttatgggtggtgttgctgctgacactaggttggttaatgaaaaatgtatttagatttaaagtgggatttattaagatggcgctaattataactgctggattctttgtagccccgatgttggagggaacaatattgtcgtgggggattaagttcctggtatggacaatggtgattatgtacgcaataaagagtctgtttggttcgaaagtgtttattttcatctcaacatttgtattgggttgggtactgatgggtcggttcgggggagttttcgatcaaaagctacatcaaatgaaaaagcgttacgtcaaactttaattcaaaggtgagaatacggatgattatgaatacagggtaaagtcactcacaagtataagatcttgatgggtgactttttattttggataaaaatcggtaacatggaatatttaatgtaaggtagagtgagatcaaatagatgtgggaggtattttggttgttggacagggattatattagtaccgtaaccaaacagtttggtgtaacaaagtttccagtgcgaatcgctattcatatagttgtcttgaaagatgggcgcgaaggatttttggtgtctcggttaagtagacgtgggaaagtcacaaacactaagttatcaacaattcaaggtcttgtaagaaatgaagagattggtgctgcggtattggtgtttttgggggacgtaaattctgctcaggagtttgcaagtttgtgttttgagattcagaacacatggttaagacctggttcaaaaaacactaatattgatgctgcgggatacggatattggaaagattattgtaacaatttgaattatccaactagacggggtttgtatatcagtcatgattctaataaaggacgagtgatagcggtatcggagttggatgttaaaaaaagtatcgacaatttaagtactgaattgattgtgcctgatttttatagggatgaatttaattcaggttttgtgaaagtaattgatgcaaattccccacgggaattggagagagaaattcaaaagtgtggtcaaaaattaggagctaggtaaatcaaaagaacattccaactaaattttagaatggtgggcttattttggatattacagtagtgtttaaggttaacggtattgagattaaagctgtggggaaggctccggatgcccgaacaatacctgttgagggcaaaagaaatatggcagcaatcacggctatcagtaaaataaaaaaagaaacgggaattgatctttatagtattgatgaggatattaatgaaaaagcggaatttccggatttttgtgagaaagaatagagatgggtattacatagcttagggttgagataataaaatttattgataatggataaattcgatagagcgataatcaaaagaaaggatattaagtcctttcttttgttttgatagaaagtaatatttcagggggacaaatttttgttaggataagtttagaagaattgataaattttttatggaggtgaatgggttggattatgatcgagtttataaaaattttgatatgagtcagtttagttctgatgaacttgaggagtttggaaggaagttgtgtcgtcaagtcctattacatattggaatggttcgttatactgcggctaacatgaagactatggatctaaccgcaggtgatttgggaagaattacagatgaggcgcaaaagcttgtactgggtttagatgtaatgtcgggaatagaggcgtacaaagaaagtttgagagcgctccttgagttagttggggctatggaaattaaggagggggttaaggggtctatcaggaaagatttaaaaaagagctttattcaggaaatgcgggatatgagaatatcatttaataaccgggtagggtattgggatcaaattggaggatcatatgtcgatacaggagcaattagataaagttaaatttgatgacattattgatatattaagatatgagaatgatgttgagcagtatccatttttaaaccccaatggacgttatgaggtaagtgacattgttatttcatcgtccatgtatgtacggaatgggggttttgttcgaaagaaagagaattccatatttggtaggaagcgtttgacaaactactcttttattgtggacacaatagggtataacatgcgggatacagtaacaaatgaatataaaatggtgtctaaggaggaggctgccgtcttagcagtaaccgggggtttaacgaacggttatatgcgtatccggaaaaataagaggagcggcgacacaatccgtatagacccttacaaagaaaagataaaggggtttaccacagaaaaccgtattatttgtgggtttaaattagatgaaaacaaaaaattagttttcggtgacgatgggcgtgtagttattaatgtgtctgaaaaagattgcacccgagacttgtgggagcagctccaaacaatgcggctatcgaaaaggaaaaagtgcagtaaaaaactagcatttcgtaaagacggcaggtataaggttttaggtgcggttaccgacagttatatagtttactctggagttggggcaactaaagcgaaggttattggttataaagtagttgacgtaaatcttcaacaagtttcatacatcacccaagatgagttaatagagagggcaaagaattatggtctatgtaacgcctatgttattgagagaacaattcgtgggaagacgcaatatttaattcaaccaaacgatactaaaataacgtcattcacggataaaaatcggttggtgactgcatttgaaactgatgatgacggtcaaatacaggggttaaaatcggggaatttaaagctatccataaaagaggattgttgttcaaaagatctttggagtataatacaaaatcagaaagacaattatttgaaaaagcgaaaatatagagttcaataaaaaatctggggggaagttactatggcggtcaaagcaaaagctgcggataaggtgaaagtaaaaaaagagtggaaagataagaaatcattgctgatagttgatgtgagtgcagtgatgagatccaattttattaagttacaatctgagggtgaggcattatttaaaggtaagtttgctaggcaaccattatcttatgaggttaatggtgaggaaatgaatacatctgcaatgtacggactatttcgtttgtttagtacgtttggtttggatcatgattatgtattttgcttcgacacacctaataacttgttaaagaagattgatgagaattacaaggcaaatagggttaaaatgggttcggagtattttgatcaggttaatacatgctataaaatccttgaggaaagtgggtacagggttttagcggaatcggggtttgaagcagatcatatggttcaccaagcggtggatgataattataagttttatgatgttatcggtgttattacaaatgatcacgatttgtcttgtttggttgatgagaaggttagttggttaaatgtattaaaaacaagacctgatatcacgatcgataattatccggaaattaataagtgcccttacaacagcatcctattaaaaaaggctacagttggggacaaaagtgacaatattgcgggtatccgtaattttggagaaaagaagttttttaagttcatagatgaagaaggtctttatggaaccgatatctatggaaatgaagaagatattattaaaaatgctgttacattaaccgatgatcagaaggaacaggcgttggcagcattggatttaatttacccatatgaggtttcggtagatgccagagcaaaaaccgaaatcaacaaaatggttataaaagtgtttcttaaaaagtatggtatgaatagcttggtaaagttatttgaataggaggactgattgttttgagtttaaaccatgaagatcttgacatcgtgaatgaagattttgatatcgtaaataaggtagagggtaaacctgggctggatctggaagagggtcggtataaggtagtaggtgctgttacggtaagtccgttgttcacaagaaaatctgctgggacaactattgctccggctaagggatataaaattttagacattgaaacaggaaaaacattgttagtatccaaagaagagggagttcgtctatccgccgagggtggaacacgaaatgcttatattgtgactaggaagcgggagaaaaaggataaagagactggtgaggttattaagactgaagaggcaatttatttgcaaccatatccagcacgtagcgaagctttcacgcaggacgatcgcttagtgactgcgtttaagttagatgagaatgggcggcataaaaaaccgcttgagttaactattactgaggaagaatgctctgagaatctttggagaataattaaagaggaatacgataaaaagcttcgtggtagtcggactaaaaaaagcaagaggggatcgcagcaggatcacacacaaatgatgagtgatttgaagaaggctttaatgaagtcatcagcggttgcggtcaatccatttaataatcgaaagtaggggaaaatgatggcggtattgaggttagagaatattgcaaatacgttgaagcaattagaggagaaaggtcgtactggcgtgtacgaccttatggcttattttggcgtaccttttgtaacaagtttaggttatgaggtattggatttaaataagacggagacagattgggaaaatgggacaatcacggtagatattgatgatcggttaaaattagtgttttccttaaacggtcagtttcctaagaatgagtatgaaagaatgtttcttgtggctgatgtttacgatcagaagtttgaactacactttaaggttttaggtaaatgggagaaggtcgctactgtttctatagataacgttgacacgcagagttacatggcgatgacgaagtacacagcgagagatcatgtagtaccggcgtttaaggaaaagggagaaaggttactgactgagggagttattaataaaaaactagaagatggggaagtttataatgattttctggtacaggctgtactttcagagctttctaacccgtcagatgatatggtcaagctattagcgaatagattggtttcagattatacaactaaagatgttgaatgggttgagggtaaaatccaaggaattaaagatgatggtttacattctgttgtatccgagctggtaagtatcggtgaaattgatggtgttcgtaaaggtaataatgatgtcgagatcaatattgaagatgatgaccaaatggatgacaatgttgtggagcagtatgatgaagacatttctgcggatattgtgagagagtttagtgtagaacccaatttagaggctaatatcgtggacgactcggagttacataatggtggagatttacggttagatgacattggtgataatgatgaagaggacgacttgccgttaaacgagtatcatggtgatagtggaaatcaagatatgttttcacataatggggaattaaacttagatgaatctgatatgaatttaaacattgatgaagaaaactcaaatgagtataaacctaaagaggttgtgttgttagatgatgattctgataacaatacggatgctggggcattaaaccttgaggatgtattaaaacgttaggagtgagtgaagttggcagggggaactgacaatctttcatggacaagaaaatatcgtccaacatctataggtgattatgttgggaacgatgtaatgaaaaataaattacaagcgttaatgagagttaataagttaccgcagactatgttatttgagggtgaacggggaacgggtaaaaccacattttcacggcttttggctaaaacgatgatgtgtgaaaatccagaggacgggcaggcgtgtggagcttgtccgtcctgtcttcatttagacaagaattatattaaaacgggtcaagcaccgagaaatataccgatatatgagtttgatataacgaaaatgaacggtgttcaagatgcgaaggagattgtagagagaatgcgccagagatctcgtaactctgagaagagagtttttattttggatgaggtacagagatcttctaaggaagcgcaaagcacgtttttaaaaattacagaggaacctgttcccggtttgtatgtgattttgtgtacaaccaaccccgaggatttgttaacaccatttaggagccgttttagtacattcaaagtaaagcgtccaacaataaatgaaatcactaagaggttagcgtatatctgcaggaatgagggtgtagattattcacctgatggtcttagacttattgcgacccggtgtgggaggattccaagggagagtattagtcgtactgaattggtggcaactactggggctgtaactagagtaaccgtacagcgagagttagaaataatttcagaaaaaatcttcacagaatttttatctgcatgtaaatccggggcattaaataatgttttggatgttgtaaataaaattgaagaaaacgatatccaaacatctgattttatcgagggtttaggtgactatgttgtttcactgttaaatgtgagatccggggttaagttagatcagtacggagcagaggaaatcaagaaaatgaggaagtacatcaaagctttctcagatagggatattgtcaatatactgaaagtgttaaaggattacagtggattaaagaagggcatgaggttccagctgtatgctttgggggcggaaataatggatgccacaaatgtacctgaaacagttaagccaattagtgaggaaagggcaagtaagaagtatacggaggtaacagctgaggttaagtcctctaagccattcaaaaaaccgaaacctgcgtcagaggaagatattatgtcagtgtttgaaaatgctaaaaaagtcaaggagtgagggtgtgaacgggtttggagagaaaagcagcgcgtagggaagattaccggtctttaattaattatgtatctttacggggcggggtcagctataaccgagcgcatctggttgttaaaacattaagtgctgttttaaagaggaatgtaaaaaagggaaactctttagagctaccgggactatttaagatcatttttacgtcgagtataggaacaatctacaataacaaggttatagggttgaatgaccaggttgaggaagtatccggtgaattgaagtttagttcgcatgacgttagatctcttttgagtctttattacgaacggatgcgaaatcttgttgagatgggatatcagatcaatgtaaaaggtgtaggttatgtaatccctaaagaagataatgagggtgtttactgtgacacaagggtaagcccggcattaagtaagcctgaagttgcggacttctttattttaaaagaatctggggatctggaacttacacagctggggagagagaatttacggtttaggattgaacttgatgattcaattcggatcccgtttagggttatgaccggaaacaaacttcagctagatacggtagaaatttaaacgtgtatgggaggaagtttaatgggtagaggaagaaaggcaacaaatattttcgtatatgttgggcttggtttgttggtgctgtttctaatcgtgggtatagcagcgaagaagtttatgtaatatgatgttatgggacgggcttttgtgccgtcctttttgtataaaaagagaggagatatgggatgagtaaaaatcaatggttagcgttgtcaggagggttagctgcgcttgtgctaattgttgttgggtttgttgtctgggggaattatcataggcagctggacgaagactcaaaagtagcaacgaaggagcaaaaagaggtagctgaaacgagttctgacaaattatctgaggagttgggtgaggatattccaactaaagaggagttggagcaatacattactaatttggaaaaaagagaaggatcactaacacaggaagaaaaagttgaaaaaataaagggtgagtatggggataaggcagcagatctaaccttactgggttatttagttagtgaagatatgtcattgaaacaggcagatgaaatgaaattgcttataagaggtggtttggacgattctattatcacggggattccagtggaaaaactgtcaaaccctttaggagaaagtttaaaagcaacaccgacggatgccgggtataatacatctgatttttcatccaatactgaggggttctctaaggaaggtagttggtacattggatatccaagggtatccccggatgggttaataaaaacattagatggtgaccaggggacgtataaagaatacggggaagtatcgttttatgcctatacagataaagacgtctcagtaagagaagcttcggatcagttgagcaaaattgacgtaagggttagtgggcacaaagcagatcctgcagggactttagcagaaaagaaaggaacaatctcggaggatgttaagggtcggggagtgtttagtttattttccggtattaagaaaaatcaatggagcaatgggaaaatcgcatcgggtgcgattgttaaagtttcatatgaaatgccgatgaatagtttactaccggatggaacggatccaaaaaatgttgacttaaacacatttgaacctgttttaaagattggaagtctagattacaaaattaaggcgggaagaaacaatcccggagatgtaatgcttacaaaataataggatagttgaaagcggtcaggagtggattatggatgttgtaccctacacataagaggtacggaattctatggggactattaatgttccccataggtgtattactgggagttataccgatattgtcggtaagtatgagacctacagatatttttatgttagttgtttgttgttatttgggtatgcgtggggcgctttttggtgctgagtttccggacattgacagtccgggttcggttcctgctcacaaacacccggttattaggaagatatttgagtttttccatgttaagcataggggaaaattttctcatgattatttttcacttcttttactttttggggggtcattgtttgtcttgtcttttgcagggagacgatggatagattcgattgtgtctgggtctacactgtggggaaccatatcgtatatgagtttagtggtgtttgtgtggatggttgcgttagatttggttgattttctaaagtggttagctaacttaatgcaaaacagaagaatgtgggcgattctacataaaaagaggtttgttatagggttttggaatgtggtgtggttgtctggggtactttgggtggctggagtatttaagttaggggcattgtttacaggaaatataaatttaagttcgggtattcagtcagcaatgattttgttagcagcgtttaaagtatatattatctttgcttgggcgggggcgtatagtcatttgtttgcagatatgacaactaagtcaggggtaagtatctttttcattcctgttgcgccggcaaaggtagcattgaagttgaaaaaggttccacttgtcggaagactcttagtccctacagactttaaaacaggtacaggttgggaggatcttaaccggtatgtggcgacggtgttatgtgtacctgcttttattttagccgtattagctctttccgggtttgatgtgagcaaagtaatgcatgtagtgcttggagcaattgggggtgtttaattttgggagttgcagataatattaaaaaaatctttgcctatgggaaaaagaaaaaccttgaacgacgagttgagaatgaggctatacgagcaagtattgaggaaggaacgttttattctgaatatagttcttttacagttggtctgcaggagatgttagataagctgcttgaaacttatgggtatcaaaaagtggtatataaaccaacgagacccgagatggcgaagtattttaaagcagccatggaggatccgcagtttgagccaaactatgttatggagaaaacggtgggtggggaattctctttccgattaaagactatgagtgagttaacagaggcgtcagatgcagcaataatggaagatctgcattaaatgtagttgacttttatagtaaaacagtgtatattgttcatacagacccttgtaggtactgtagtagccagttagattcggtctaactggctttatttattgtgaacgaataatgggtatatttatgattactgtatataaatgttgatcggaaagtaaataatataaatagagatggattgggttcgtaccaatttgaaaaaaggtttatggttgaggattactttattcaattgaggacgaataacaccgtgtagacaaacgtaatatactgatgagtgaggtgttggtcatgggacggttaaagagagatgaggttttagaggtttataaaaaacacccagagttaaacacagccgagattggagaaattgtgggtgttaacaggcagtatgtaagtaaggtacttaaagatattggggtaaacccaagggatcggcagaagcagttaacggatatgagatttgctaaaaaggttaaagagtttgaagaaaagtacagtattgaaaaaaccatgatggatatggctaaggaattagatgtatcaactgcgtatattcaaaagatacagcagcatttgggtgtatcttttcgcgagggagctgcagggagatacaagaaaaacgtacaaaaggttggagaattatataataagggcatgaccattaaagaggtatctgagaagttggatctgtctgagaggtatgtttcaaatttattaggtgaatataaaaaagaacgtgaagcagaggggcgagtcttatgactcgctctttttttgatattaaatgggttgggataacaataaagctagatagtcggaactaggataaatagaaaagggttattgaggtgatggtgtgagtaacaaattattttggggttcattggttgggtttttagtggttttcctgttggtagctatttttattgtctttcaagtaaaccacgaaaacaaggctggaagtaaagaagatagtgtagacaccagtcagtacaatacggggaaaatgtctaaggaggaaaaagaagaactcgaatcccatattgaggctgaaaaagatgtaacggtggataagcgggatatgaaaacttttctaaaggattatatggatgttccggtaagtacgttagatatggatacagccgtagtgattttttataaaaaggattatagtttctcagaagagttcaaggagaaaattgaggagtatattgataggggaggggcgtatccggttaagtctacatatttaaatgttccagattcgtatgtagtggcgcagcaattggtgagagaaaacggtttaagtacggatccattcccgttagctatttttattaaggatggggattttgttagaagttttgatagtttagatgaattaagtgaattgccggtgagggattgatatgtgtcgtttttatcgagttgtgttgggtgtattggtagctatagggttaattttagggttgggtgtgcgtgctgaggctgctagtttaccgaagcctaagtatccgcaaacagatccggcaaagggtaccgctccggagtatatagaaaaggctattgcaaaggcgtttgagattgttaatcaaagtccatatacctggggaggggggcatggtaatgaagcgcagtacaaccgtgttccaccacttctagattgctcatcatttgttcactgggcgtataacaggggtgcggggttgtctttggttagtggggtaaatagtgctggtacaaatactaaatcccttattgctaacatggatgtccgttatggtgtagagatcaaagatttaaaacgaggagatttaatcttttttgatccagatggcggaaaaaacaatcatgtcgggttgtatttaggtgaggggatgtttataaacgacgaaaacaagtacggggttgcggtagattcgttaacagagggttattggaacaagtggtacaacaaaacagctataacagttaaggaagggggaaagggggttaaaaaaggtaaggcagaacccttaaaaaacggaaatgttacaggaacaactgaagacactactaaatcaacaacaagcagtgataaggggagttctaaatcttacttcaacccgtttaaatccagaacatttgcggtcaacaacgtgggggttgtcggagcagatgagcaaatgccggcagatgtaagtttttacgtatctggttgggttaaggatttttataaggtaatgttgtgggttgcaacaataatttcggcagcgttttttgtatacacaactattagtgtggtttggtactttgttatgttatcaaattcaagtgtaaggggaatggatacgtttgagaaattaacaggtttagattccgataaatccataagaaccaaattaaatgttataggaagatggggagcgagttttttaattataacgttgtttttaacgggtttatacgtaccgattatgggcgctatgtatagagtcgtagacggtactgggatatttggttgagaggacttagtctatgaaaaaatataaattgattatcagtctagttgttttaatgatttgcagtcttttttcgggtcatacagcaagtgcagatgacctgttgagtaagtggaagggttttgatatccggacaaaggcttctgatggagttacagcggagaaaatcgataaactgtttgcgaaaaacgggtctggggggaagttagtcggtcagggtaaaaaaataatggcggcggcggaggcaaacggtataaaccctgcctttattgcgggtcagatggcttttgaatcagcatggggaaagtcgaatttagcaatgaagaataataattttgggggaattaggagtaagtcgggttttccaaaggatggtaatggttggtcaatttttagttcagtggatgaagggattaaggttcaagcagaattattaaaggattatactgaggggaaaatagggtctaaaaaattaacatcattttgggatatacttcaggtttacgctccgtcgtttgagaatgaccaaagtttgtatgtgtctgtagttgcagggacgatggacaaattgggtcaaactcccgatggtagtctggcaaagggtactggcgagtataaagacgacaaaacgcaagttggtgaacgaactaagggtataaacttctttatggagcctgcgttgggtcgggtaggaagcacaggtatagattctggggacagtgtaattggcagtgatgcgttatatgggtttggaactttttctaaaaagacgtatgggattttattgattattgggatggttttagccgctattctatttgtatatatgtcagtaactgcagcaatgtatgcagcagcggttaagggtttagcgagtggagtggcgtttgaaaagatgtctggaataaaagatgatgtttatgggaagcgaacatttacgaagctagtcattgcgatggtaattggatttatgttgtgtgttattttcatgactggattatatatcagcttaatgggtgctatataccaggcagtgatgtatgcgtggtcgttattatttggcgggtagaaagtacagatgattggatagaagataatagatcagagctgatattttttagtctcatgagacgatgtagtgggaggaggaaaacacatggttttaggagcggttgatgtcggaggtcaaagtggactttcggatatcgttcaatttttcaatacgcagtctgctaccggtgatgtatccggagctttagattcctcagctctagcgttcaagatttctatgtttgtcatcatgtttgttggtggtttggcaatggcgatctggattgggcgtattgctgtggatattgctgcgttagctacccgagggtttggcggtagtgcgggggcggttgataaaatcgctaagtttggaacaggtaaatcagattcctatgaaagcgtaggggcgtatttaaaaggtaacctgttagaaatcattttaatgattgtgttaattgcatttttaatgacaggttggttgttccgacttatcgcaatcgcactcgatgggtttggaacgttgggtaataagctactaggtttggatattgcaggtggacttgctagtttagatgctgaggcgtttacagaacaagtacaggcgagacgtactgcgagtttacgtggtgagtatgatgatcagctttcctcagcacgtaaatattctagtagcttgtatgatcaggctaaagatggcgctgtttcagatgatccgcaatttaacaaaacaaagagtttgtacacacaagcaatggtcaaagctgagattttagctactgaattaaataaacgtggtgcagcatctgagcttaaactgggttctagttactttaaacaacatttgagacaaaacggggatggtgtttgtaacgcgaactttctagtgagcgatgtaatgtctacgtacagtaaaaaaatcacttgtaagaagtaaagttgtaagggtgtctcttccgtttggagaggcactttttttattgatagtgatgataggggatagtgaaccgatagcagttaaactaaaacatgtaataaatgattttatggtagaagaggtgaaatggatgagggtagccaaacggttgttaaccgggctaatgttaagcgcagtaactttcactgggctgatatctcctttaggaaatctggcacgagcagatgatggtggggcagataagaatatttataaagattcaaacgctaaagtaactggtgctgtgaatgaagctgcctcatatagtgaggggatgcagtacttagttacatactcaattctccacagcatgtatggatctactggatccgaatctgattacgggaaaatttatgatggggcacaacctacaaactctgtcgataaaaataacccgtatactgggattccggattttgcttttggtggaacaaaagtctatgaggcggctaaggcagggaagacggagacagaaggatcgaaggagtcctccactgttgaggacaatgcaaataattatgataagaaagtgcagaagcttgcagaagagatggcaagtacatatgtagattggttagggcagtattttggtgtaggaagtgaagctataaaagtatctggaaaggatgacgcttggtataactggggaggcgaaggggtcagtacagttgtaagaatggatgatttagtgtatgactcacgtaaaagcgctaaaaatccggtatcgggatccagcagggaattaatgaggaaagttattgttaattacattaaaaagtcacttggggtgtctgggtctgctgctgaggtttataagggtatgacgattgacgatagcgttatggagcaatgggtggcagattatcggagtggaatttcgacgtcaaaacctgtatctgtaagtcaggcagtaaatcaggtaatgtttgagatatccggtaaaaagacgaatacagatgcaaacaaaacagcacttaaaaagtatgcttcgtatgttccagaagtgaagactgagatgtattcaagttctgataagaaggcactaaataaggatttagcaaaaaagaaaactgattactacaacaagattaagggaacttcggtgtggaaagattttgctaaagcgaagaaggcaactgaagaccaagcccaagatggcgctaataatgttgcgagcaaaaaactaaaagctttggcttggatgcctttaacccctagcttaaaaaatagtgatattaaaagcgacaaatccttcgtagattctttgagcaagttcgatggaagtaaattcacggacacacggctacagacaaaggatgggaaaaaccgagcagttcaagttaatgacctatttgcaggaaagaaaaaatcatcacctgttttcgtctacaatacagataaatatgaaaacgattatatgggaatgttttttggaggttcctcaaaacaggctgatgggtcaagtactttagggaggtatattgggcttgaaggtgaaggtggcaactggctagggtctgctgggaaaattaagacaagatccagttcagatgatacaaaaagctacagtttggcacttatgcaagcaatcacagcggataccgctgggaaaaactcattgaaaatggacttagatacaagtgggtctgatacagtaggtattgataattatgggaacattattgatgccaatacggggactgttttaattccttactggcaaaacagaacagttagcgaattagatggattggcttccgggggagagtttgtatcgtcctcagttttccgttcaaataaacaagggtttgcaaaacagtttaaggacttaaaaatcggcagtaaagtatcgaaagtcaaagaaagatctgtatccgatacggcaatcgaagcactggctggatcatctgcagcaagttcagtcaagagagttaaaaacagtattccttcaaaagtaacatatgaagatatggcttctttagtagctgccgggggtaaaaacgcagctgaaaatgaagcaaatatcagagcgttggctttaattattactgcagggacatcaaaagaggttaaaaattggaacgaatcctttaaaaagtactctaaggacgcaaaagagatgtacatcacaaaaacagatggcggttacggtgatggtacgggaaattctgattcggatgcattggctgagtatacaaatgccgatttaagagaaagaattatgatgattttagatactggcttttatgaagtacttaggttaacgatcgcaagtatggtggttagtatttacacatcatcatttattaacttctctatgagttcagtgttttatactcaaactattacgcagactgctatgtggtcagatttattgagttcattgagtttgcttttaatggggattaccggtgtatatattatttttatggcgtttaaagtttttcgaaaaaccatgtctggaaaagactttgtgcggcaattcatattgataacatttgttttagtcattccagcacagatatacggacccctaattaactttgtcttaaatgtaccaacggataaagttgtcgggaaacaaatacagcaaacatctatacttgatacttcgttagatactgaggctaaaaaacgagaaaatgatgaatattatgctaaattgtttggcggatccacagagttaagggatagaagccaagattacgttatctatttctatacaactcaacataaaagtgggtttgatgttacaagcgagaatccaaacacagcaacgtttaaggatcaaattcgaagtatagaggcaaagaaaacagggaaatggaacaaaaatgatattattagggttggagttagtgcctatgacctttttgattgggtaaaggctacagttgataaaaagaaaaataaagatgaaaacctatttgaatggttggcagcaaataaaaatgaagatggaagatacgatggtataacggactatcaagaatatcacatcaatacaaacaaaacctttgaggcactaggggttaaaacaacgaatgggtataaaaatttaacggcgtctaatttatttagaatgatgtatgaagaagcatcaaatgacaaagtaaaggatcgcattcaaaatatttatctcgtatcagaggcaattaggaatggtgatcacggttcggatgtcgtaactgatgatgaaagagaagcacttatgcgggatctttcaatgactaaaaagagccggcagtcgttatacggatcaaaaaaatcagatccaaaagtatcctataaggctcagaaactaatggatgcgaatgggttagaggttcctaataatgactttttaaatttagaaagtgttgttaataagttggtgccatatagagatccaactacaacaactttggatcgggatgtatatgacattaatagaaaagttctggatgactatgttgaaacgtattcagtagttagggaatctattggtggggacggagatcaaagttttaatcaatctgaatatttgatgatgattttagatgcctttttcgcaactaataatacactcgatcttcctatgtttccgacaacatatcagcctgagacagtttcattcgatagttatatgagaatggcgtttatcccgttaaaggagtttacatcagataatgttgaactaaataatgtggcgcagtacctagcccttagagataacccatttgtactgctgtttttctttctaccggcgctggtggcacttatggtgtttggaatgatcttcatagctgtattttatgtagttatgatggttgttatggttatctcgtttatttggcactatgtggtcaagtttgataaaaataataaatcttggttaggtgctttgatgattatagggtcatttgctatagccaagtttggtttgatacttctctggaggggtatgtcgtatttcttgaattatactaccgtcaataacgggggaatcacttacccatacacgttaatacactcattgataattgttgcatacattttctttatcgtgaaatatctccttctaagggtatttaaagcggtattgaaggataaaggaaacctcggtggggagttatttacgaagggtgtcagtgaaactataagtaaattcggaaacaaactaaatggtgggctatttgggggaagatcttctggaagtccagaatccgcaagcgcaatagatcatacgttagggaatgaaggctctgacggtaagttgttggaaggaattgccggaattaatcttggagggttggctaagaaagtctgggataagtttaaaggtgacaaacacgatgctgcagatattggggaatatattaatgcatcagttaaccaggacaacttcggtgctaaggctaaaaatagattcaaaggattgacttcgggagctgcgggtcgtgcgatggagagtgtgttggatgacttagatgagattacagcatccacttctggtctatctgatgcagcgttatccgctctaaaagattctggtcaagtaggtcaaatcctacaatcttctgcggatggttcaataataacagctatgaatgcggacaatcctgagcacgctgagttgattgcaagccatctaagagatcaaggtataaatgctaaagtagatgaagacaatgttgtttttgacagcagtaagttcgatttaactgatgctggggtacgtaagggattgtttggtgatcttcttccaaagctatatcaggaagttgacggaaagtctcaaattgaatatcaggacgtagataacccgttaaactatacgaaaaatgatgatggttcaatttctttaaatgttggagataagggtctatccccaaaatccttaaatactctaataaactctaaagctttttcagattcatttgaaatgatcagccctccggttaaagatgctaatggaaatttcattccggggacatttgatgtggaggctaaaacaggggttaatattcaagaagcagttgaaggtttatttaagtctgacacagcgatgagagaagttaatggtgaacaagctagaggttctttaggtttagacaaagcaatgacgtttaatgtggaagatcctgaaaatgaagatttaatttatgatcacatggttgacggcatgaaattgcaagacggtcaagtagtgtacgatagtacagaccaaactcatgttgcggctatcaataaaatcagcaataaacttagagcaaagacagacattcagcagcaggataaaattgatttaatgagaaagctatcctcgcagattgttatgggtggagataatggattccaggtagaatctatttcaactgctggaaactccgaggcacaggagaaagcgatgtcgatggggcttctacacgatggggtaaattcaacagtgtttgccggggaagatgcagctaatattgctacgaatttaaatcaagttaaaaatgtaatcaatgcaaatccacagactgttactgaatttacacaaaatcaagaagcactctatagagctggtgaagagctgatggttggtaaaaaccaagattatgataaagcccttcttaaaatgaatacttttgcagaagctaataatgttgatgatgggcgggtaacaaatattatgaatgattatcagaaccttatcaacatgaaagaaaataatgacatacgcgaggttgaatatacacgagaggttgaaaaactgatgagtgatatgcagactacgttgcaggatcacggtgtatatgaaaaagcagtttcagaagagttaagaaagagcaagtccaaagagagtaaagaaattctcgataatttcatcaaatccaaaaaggtgttaaaagatcagggtattgatacgaaggtattgagtagtatacaaacttcggatttagatacgctgggtcagttgattggagatattgaggatgtaagaccgggagaggatggattacttaatgtaacatcggctagtcgcttagatgagggtgacacatcccgattaattgaacagatgcaaaggttgcacttaccatcttagatataaatgagggagtctgatagcagattccctcatttatttgtttatatgggatattaaataaagatgatgaaacctaaattacaaatttttatatgctggaagctgattgttagaagggagacgaattatgggatttttcaataatccgaggaaaatgttcattccgttaagcatagacaatgctgaatcagagaggttaaattatttcttttcaaacaaaaagatggtggggatgacatttgcccttataccgtattttatcctgttatatccgttgttgcagggtggagttaaggttttagctttagtaatcgtaacagttgtttatgcggtgttatatttctatttcattcgcttctgggttcttgaggaaaaaaggttgaggcggatggttagggagttggatgataatcgtgtaagtggagttagccatttttggggtatcgacaaaattggtggtggtgatagggataatggaattatctactatcagcgggatggttcaaggttaaaaagagggttagtggtgtattttgatcgagggtctacagtgggtgtaccgaagggtcactatgagcagttccgtaaaactaaaatggagtttatgcgagagttaggcaaaagaggaatgaattttcagtggtatgagattcaaaagagagcggagatgccacaatcattaatacattatgcaaacatcttaaatgaagaagacaatgatatagcacggaagctattaaagctgcagcttaacataaatatggtatacaccatggatgcggagcagaggtacgttgattacattgtcattacaaacaagaggtttgttgttatgaagaggtttaaagaagttattcaggatttagttacaacaaagcttggcggaaacagttatatagttgaccccaaaattttaaacaaggaagaagtagaagagttttttcaaaacgtgttaatgattgattcattggatagtgatttcattagaaaagctgtcgaagtacagccatttgaaaactttgcgagattgcaccaggttattgataaagacgggaaaagtgttccattggagttacttgatgatatggatttaaattcacctaagtatcgtggaaggtctttagaggatgcattgagttgggaagagaaacgtgaagaagctaaggatagggaacgaattaaaaaaatggagtatgagttggagaaggctaggattaaacgaaatagagatcaaattacggctaaagagtatgaggaattaaaggaagagattgagaaaaagtttgacccggaggtttatgatcctgatgcagataaaaaggaacgagatcgtattaggggcgagaaaagaaaagagcgtgacagagaaagggcaaacgatcaggaacataatgacttggtagaggaaccggaagacacaggttataaagtgataaaagttgtggatgttaaacaagacataccagaaaccgagggaattgttgacttagatgtatcgttagaggatttggttaaaaatgagagtgaagattatggggaatctgatcaaggatcaatgtcattagaggagctattgagggattcgaatagaggataatttgttggaggtattgattatgtgggtattagctggtggaagattaacagaatctgtagcaggagcgttggccggagggagttttaataaacggtctgttattggtgtagagagtgtggatgatattttagaaacgttaaggatacatggggcaaaacattttgacagagtgtctgggttcgttgtgtttgatgctgcagtatcgtcattaaaaaattgggataatgtccgagaagttgcaagggtgtataaggataagcctgtagtggttgtaagtaggtatagggatcttacacctgacccagacagtatgggtggaaatgtaatagtagagtgctttgatggggggataccgattggtgcggttgcaaatcttatagatcggttaaactccggtaacttgaaaggagttcgagtttagtggctgattacgggttagttgcgggaagaaaggcaaacaaactaatcaaagagaagttttttggtaacactcgggagttcaacttcccagtagattatgattcaacagaggatcttcgggagtctctattgagagcgggaaccttggctattgagtcgttaaaggcgattttgattattgattatgggtttaaaaatagtagtgatccagatgaaatggcaaaagcgtttgttagtctgcaggatatgtttcgaacacagagggttagaggaattaagttatacctaatcacgaaaaactcagatctttataacaagcttgacggttctgtggatggggtatccggtactctgtatgaggatgtagagattttcttagttgagcaggaatataaaccaaaaacaatgcaagacattttaaagggaaaacaggatcgtatgggtttgtacaacaaagaggctgcgatgcaagatagggagtctcgatatgagagggagaaggaggagtttattcgggactcccgctcaattgatgacgatattttaaggtacgggaaggatgaaccggttagtgacttatcgaaagttgattatgcggattcgccggaacgacttaaaaaagtagctaatagagaaaaagagattaaaagaaaaaaagacaaggtaaagttaaaaaaggactttaatgttaaaaaggttaccgaatatcgggaagaacctcaaaaggaagaagttaaaaaaatcaatattacaattcgggacagccggttagatcgtgcaccacaaacaacagaagaggatctattggatgttttgcgaaatgtgtctggcgggtctacaagtgttccagttggtaagcttgagtcggattcgggtgttatgtcattcataagcgctcctaatgctgggggtagtgggttagtggcgaatgtggcggacatgtatgctatgagtaaaagaaaggtacttgtagtcgatttagatgtgcaaaagcggagtcaaacactgtacttcaaatcatatgagaaagcggttagaaaccatcaaggtatttcaaattcattgttgaaagtagcgcaagggggaaacattaagggcgctgctgtatcagtcacaactaagatagacgtgttatcggtttctaggaacgaagatgttgagattgactacgcgaattggattggtggggagttagcaaatattttaagcgatgcccgggaactttacgatattgtgctagtggatatcccttttgtgatgttggattattatattcagggacttgtggcggtcgatagaaatatatttgttgttgagaacaagttttatgctattgaagacttttttgtgttaagtgtgcatcggatgttagaggagaatcagtttgttatgggtgaacttattagaaaatcgtcggttatcttaaataagtttattcacggtaaccgagacgaggaggggaatgagttaaatcataaacagcttaaaaggatgctggatgaagtgggttatccttatgattctatgatggttgtgggggaaatcccgttctatgaaaaatgggaggatcagtttcataccggcattaggtacctatgggaagatcggttagcgttaggggtatataaacgtgtgtttgggaaagtggtgctgtaagttatggaggggaaaaagtatttaaacgataatgaaccaatctggctaatcacagaaaacctaaatgttaagcaggaaattgaggatggtttaaatagagaagtggtgctgttgaggactctttccgatttggtggagaatgttgaattggctacaagaggtgatcgtgttgtagccaatctaatttatacaaacacaatgatgacggagattaaggcgaatttacgaaaggtcgttgagttgataaatgtactgactgatgtgactgtttttgaagtgggtacagataagacatttgatggagcaattcggtttagtacagttaaaaagatgctgttgtttgcaaaagaggcgagaagggagagtcaaatatctcaactggaggatagtgatccgaagacggaattaatagaggggttacagattgatctcagcgccgcaaaacagcagcttgagaaggtaaatacagagttaaaggaaacccgagaagagttaaaggctgcattggatgaatgtacggatttaaaaactcaaataaacaatgtgtatgaggtcgatcttaaacttaaaacagatttagttagtcaattggaagaaaggcttgcggatttagagagttcattgcgggtggagaaagagaagtctgaggtttatcgggtagagaaagatgatgctttaaacgaattaacgaatttaaggtttgacattacagccttagagaagaggttggatgataggaagaaggaaaaaaagattcttgaaggaaccatttcccggcttgagaggcagataaatcaggttaataaggaaaaggaagagatcttacgttcgagggttgatgaggaagcgtatgtaacaatttctaacgaactagataaagaacgcaaaaacctaaattcggttaaggcgcttttacagcaagaaaaaataaatagttcaacaaaggacttaacaataaaggagttgcaagaggagatagatgaattgagatctggtgcggatattttaaagagtgccggaagatcaaattatttagacaagtataagtttgcgtctacagatttagtttatataaaagtgtttatagaacttccgtatcacagattagcagttaaaatgctctttgataaacttgctgagagagtagatggtgtaagtcatttaattattttaagaaacgatgagggtttggataataaatattttgatggggtacctatattcggaaaaataaaagatgcacaggtgcaaaataggatttttcgtttatacccaaatcgagcgatgtttacgggtgcggattcctggagcaaaaaggttaagagattagttgttctcgactacataaaaagtgatcagtactatttagaatcccatgctaaggaacggtatatgacggtggtggatagagcaagtaaaatcgctcaatatgggttaagaggggcacctattagtttagatgctgagtcggtatttgatattcgtttcgatcggcatattgctgaatcgcatgtaaaacaaaacagaagaggaattttagaaaagaagatagaaagttggatcaaaaaagcggatttgtagggggtttgttcgttgttcaaaaggaataaagaagataaattaacaaagagagaaaaattagaaaaatctgggcggaaaaggaagttggatctggggtttttggattcaattaatctatatacacggcttgctgcggacaagttaacccggggaggtatggatgtaccggacagggttttgggggatgggcagttttattactctacaaatcgtatatttacccgaagaggggttaaaaagatgtttttcatccatgatttaccctctgaaataaatagagggtttgttacggatttaagagctgaaattaagagggaagttcatacgtataatgaaacaaacggtgtcgttgaaaatgcgtctgttacattggtgattaattcagatttttataatttggattttggagatcgtagggtacaaggtcgctggtctaactttacaaggcagtatgaaagggtacaaaaaaacgcacaaaataaaaaactagaagacgagttaaagtcggataaatatagcgaagcagtggtaagaaaggtgagatcgtttttatatacaaaagaagctaaagatgagcagaatgcttctttttttaaaacaaaagttgttctagagattatggctacttctgatgaggtgcttgaggttgcagagaatgcattaaggggattctgtttcaggtataaaatcaaaacaaaagaagtctttgtgcagacgaatgagtatcaacgagcttttaccccggcagggagtgtaaaaaagtctttattaaaacaaatgaatgagggggatgtatgggctgatgatacgttatcctcattcaccgtaacaacgcatggagtagttggggatccggttggtatttaccatggggtagatattcaatctcggggtatcgttgcttttgatatgggtaaaggtgaagatgccaaaaacgtgttgcttgctgcgggttcgggggaaggtaaaagtaattacgcgaagatgctgtacactttttatgcaccggttaaagagtatgctacggttgcttttgattttgagggaagcgagtatatacctttagggagaattttcggtgcaaatgttattagtatgagtgggcgtgagggtaggtatgtaaatacggttgttattggggataagacgggagatccgagtatagataagtaccggaaaaaagaagcaatggaagcgaccgctagggttttccacttacttgttgatgagcggtatggcatgacagcggagcaggtagctatttttagtgatgcgttaaatgaggtttatgctgatttcggagtgacagaggatgaggagacctggtcaaaaagtaaggacattacgtacttccatatttacgcaaagataagggagatgaggtacggtcgtgagaaaaagtatattgaaatccatacacaggaaatactcaataattttattgcgatacttagacctttctttgaaatgggaggactgtataagcattggttcgagtcgccaatatcgttagatgaggtaatggaagcaaagcacgttatattcagttttggtatgggaggtacggatgaaaaaagtgttgattcgaaggggttagcgctgaggcagatgttcgccagttatctaacgcttttagtggcttctagaaataaagcaagaggagtcaggactgttgtgtttttggaggagctgcagaggtatttgaagcagagatactccggtgaaatagtggcgaatttttcatcaggtgggcgtaagttgggtatgattgtttattacataacaaactcacctacggcactactaatgcaagctgaaacccaagatgatgtaattttggacaatgcggcaacgattatgtctaatattaatatgcagattataggggcgttaagcaatacggatacagaaaacctcattaattattttgggttagagaatgctcgggggtacttaatggagctttccaaggtacatgaaacaaatcaaaagaatgcagatttaaaatactgtttctttgttaggtataggggtcaagcggctattgtgagaatgttatcgcatcctgatttagctgatttaccactatataaaacactaaacaatgccggggataaaaatgatctgagaagagtagagcatatggatgagcgggatgttgaagggggtattgtggctgcaactaaaaaagaagatgaaatgaggaaaagggatgctacgtttaaagaacgtatgcagggaagtaaggtttggtcataaacaggatatagaagaaaaatccgacacagggagagtgtcggattttcactggaaaatagggtttagttaggtaaagttaagtatacgggctaaaactataagatcgtgtgcacacaattttataggagtgttttagggttgtttgcccgagttagggttactaacaatattaatataccctattaaccggtatgtatgcaaggaagatattgtatagggttttattgataatgaatatgaaaacggagtcaggaagaggtgatagcataaggtataggggagggttgctcaatggggatgagtaaggatttaattaagtataaaaagttggttaaagcatttaaaaacgatacgagaatgtatcgagagggtattagggagatattcttttttgagcatgcaattgatattctggaagggacatctaaatgggaagagttaatgcaggaacgaatgaaaatcatgattgatataaatagagaatataagaaggcaaaagagagcgggcaattgcgagataaggtgaagttctataattattttcagtgggtggtgaatacccaagaaataagggagagagttttatgaaattaataatggatagtgtaatgatcttctatatgcttattttttcatatgcactgggtaggaagaggtctgatggaagtaatgttgttccaatttacgtgacagccatggcaattatatttgtattggctgtttttctcattttaaatatcccgagcattctggagctgatgcaaaattacgggggataggtcgaaagttaagataatgggtatagcaagagactagataagtattgggggttgtagcgtgaagtctgaactaacaaagcatgattggatttatgcaaagaaaaaagaagaacaggggaaggttcttcggtttgatcaaagcaactgtagggagtttccggatgggtttcaattgttaagggagattgagtcgcttagttctactgggtttgatgtacgagattacggtgaggctgaaatgattttgatggacttaaatgagaaattaaatagcaagccatataagatatcaatgcctattccggatcatgaagaagattacatcattcagttggataacggggtgagtatttggatcgagacttttgataagtatcatgggtgcggggagtctgattctggtgtgtgcttgatggggtttatgtttgaggactttaatcgagataacatagtagaagctgcaaaatggttagctgaggttatgtaggtgagggatggtgaggtaaagccatacatataggtggtgaatagttatgattaaattcacagaaaaagatttatatgaaattgaatatggtaagtttgataggtttatcaataaaaaacttcaaacaaagactgagtacaatcaggaatctcagttctcatcagatgacatagacgattcgggagatctggatatatcctcggttgtgtccggtgatccttttgactttggtgataatacaaatgacgactggtcttttgatggtggcggggttggttacggtgttgagcctggagataaaagcggtgtggcttcagcgcaagattggaaccgagggaatccggtaaaaacatttttgatgtcaccactgtttgtggttaagtacgtgattgtggatttgctgcaggagaaaccaaaaaaagatgagtgggaaggcattctaaaggcactaaataagataaatgttattgcggtagtggtggcgatattagtgttagtgctggggttaaattctccgttttctccggttacgcaattggtagtaggtttgttgtcttttgtgggaactacgctcactctaaagtatgtgtacaatagtgggaaattagcaacacaagaagagaaaaaggatcttgattttgactttgattcctcattcggtaatgaagtggattcagaattaaatgacttcaatagtgacacagatttgtttaatgatgtggatccagcaggtatggtggacgttggagatattgagtatgatgatgaagatgaaattgataacgatgacgaatatgaaaatgataattcattgccggaatcgaatatttcggtgagaagtgatgatgaattctatgaaggtttgcttgaggctttttctaaaaatcagaagtacatgggtagagaaatctatgagaggaagaaaattttatcttcattttccccgtacatcgttacaaatgacagatcctttggtaaatggaaggtacctaaagagaggtcattagaatacaacaacgttgcgtactcattatacaaggggctaatagctatagaaccaaaatttgaaaatgacgactctaagttaactgtgatggacattcgtaagaatccgcttatttataaaatagaagtacagctgccgaactatttcagtaaaagcaaagtggaatccaaggtaagagtaattgaggatattttacgtaattcagaagatgacagtaaggtatctgtcctagttaagttttttagagggaggtttgtttttaagttcctaagattagacaaccctaaattaatatcattgggggatattctaagattcaaagatgatacaaagggaggtaaaacagcctttgaggattttgcggatgatgaaaaggggttacctatgctactcgggttaaaaaacaatgagtatccttacattgttgatttagaggaaaacacttctggggtaataataggtggctcaggatccggaaagtcatggttaacgtttttattaggtacaaatttagtttttgctaatgattataataatgttcagtttatcgttatggatagaaaaaatgctccgttttggaatgcgtttgctcggtttccgcatgttttgggttaccatacggacacaaactcttatattgagatactgcaagaggttgtaaacgaaattgataggcggcaaaaattaatgaccgagctgggcgccgaggatgttaaggggtacagaaaggcacagaggaagaaaggaaattatgatgaactgaagaaaatgccgcttctgattgtagttattgacgagattacagcaactatgcaggatttcttagcgaaggatgataacaaggaatcgtacaatctggttaagggtttgatgtctacaatcacatttatgggaaggtcgtctggtgtgaggttgttagcgattgggcagagtgctgtcgatccttccttacctaaagatattaggcgtaatagtacattccggttcgggatgaaaatggatgctgaatccgactttaatatcttattcggtgatgaggctaaaaatgttactaaaccagcaagtgccggtattggtctagctaggacaatgggtgagtccggaatgcacatgattaaaacacttacggtaggtggaaccagtaatgagcagattttggcgttgttgagggttactgcgtttgattggatcaggaggagtataggggtcgatcagttaagtaaccctccggagggtatggagatatccgctgcgtttaatcgaaataagttcttagagatgtcgttaaaggagatggccgagggcaggattttaaatccatctgaggtgaataccggttacgaggttttaataaacgaggacatgaccccgggatataagttaaaaaagtatgaaagtacaggtatagaactgacacaggaaaaatcaaaaaacataagcttgagtaaaactccgaatgcaaacaagggagtagctgatgttgattatggtgatatggggagtgacgacgatagaagtggtttaagcttcgaaacaaagaaaagcacagaacccaacaaatttgatattttggatgaggttaacgatggtttggaatactccaatgatataaattcaattgaattgaaagagggaaaaacagattttaaggaaatatcggatttcaatgaagatcaagttgttgaaccggattggtgggattcgatagatgatgagaaagaagataatgataatatcaatttccaagaaaataatgagtcagaattagaggaagtagatgctgttgtttctaatactaatgatgaaacgggagagttatctctagaagatcttatgaggatggaggaagattctgaaaaccttactgaacaagggtgtgaagattatagtgaactttcacctaattatgtagaatccctagaaggtgggggatttaacggggtttcaacggataaagaacttgttcctacagaagttcacatggatggtgaagctgcggacaccggtgacaataaaccaccattggaaaaaactcaaaatagagacaaagataagttaggaagcaaagaaaatcaagaaattgaaaacttagcggtagttcaggaatccggatataagaaattgcaagaaatacaaaatcggaggaagcctaactctgctgcagttgaatttgattttgtagcaccaactaaaaaagaggaagtaaaaaatccggaagagtcaattaaacaatacattgttaaatatggggtgtctgatggaaacttcacctataggatgtccaaggaagaaattgagagtgtgtattcaaagcggaaaatagaagaggctttaaatctagtacttattgttgcggatggttctgattatattgctgaattatgaggaggggtgaaccctccttttgttatgtctgaaattaaaaaaagcaaaaaataagaaaataaattaatttgacaaaatggtatatttatagtatagtataattaataaacaaagttcgggaggaaatgaaattgctaatcaaaaaaacaggtaaccggtattacagatacagctggcaacagatgagaagtttcccaattaaaaaggctgaagctgagtacaagttgaatattggggaagctgaattagttgattcgtttccttctgatccggctaaagaggatgtagttgaaagtcgtagtgttggacatgaacaattacaaaaaaccaataacattgtaagtttggaggatttaagaagagagagggaaaaccgcgaaaagttagaaagggataaagcttattttctaaacagtatattacccaagctgagtcgggaggatgtgatccggttaagagatgccgcattagctggggatacagagttagaggctgaattgcacaggttggggttggctgtagaattaataccggaatcaagtaaaaaataatatgggagggtttaaccctcctttaacatacataagggagtttgtgtgaaaatgaggaaagaggatcaaaaaattgtatttctggagaaggacgatgtagaggaagggtattatgagattgtgatggatttgtacgaagggggaacaaaagtaagatacgagcaagcagaaacgatcaaaacgtggtttggtggggatgttcgaaagtatcttgatcgaacggtggcaccaataccttgcaataggtataggggtgtgcgagtttaccatagtgagcatatctacaggtaaagacgataagggttaaaatcccagcataccttacgtggtgtatgattgagaataataaagtctaatcagtgggggaaaggtatgtataacgttaagaaggacttagttttagggtctacgggggtattccaggtaccctttcttttattaaaggatggggaatgttcagtaaatgatgtcattgcgtgtgatttatctaataatcttctatctgatgggacattagatttagaacatttcagaaagaaaatcatttcaaggtatggatttggacacgagtcagattttgaccaggtgttggtggggtatgaagctaatctgtggtcatgggatcgtggagttgaattactgtctagggattattcgatgagtgttattaatatattcttgggggagttggcatcaaataaaaatctgatggcgctttgggatgtatttgatgtcttccgggaggcagaccatctactggatggtgacagcattaatgtgtttactgatcgagattatgttgaaggtacgtttaaggaaattgagcaggaagaattgttggcgctgcaggagtcattaggtacggattttaaaattaaagaaggtttcgttgtgtattgcaaaggaagtaaaatcattcttctggaggaggatacacaagaggtgttcctgtttagtaatgaggatgagttcaaggaattttgtacaagacgtgagttgattatcaaatttatgaggtgaattttaatggacaaagtaacgatctctcgtgaggaaagtgtttttcattcagtattaaaggttgatgggttagaagttaacgataaggtaactttacagtgggggaaaagtaatgtaacggcacgcataaacggggaaactaaggtgtcgatatttacgagtgtggtggatttaatagcttatttacactcagaaaagctgttcaaacaatcaatgcgcgatcgaggtataggtgattactttgtaggagttgattattctccgctgcacacaagggttaaagaagggcttgaagatgacgaagagagcaaataaagactaacagattcggtaatggggatgagttcaaggaattttgtctaagacgtgagtcgttaataaaaatatcgaggtgacatggcaatgggtaaagggttagtaaccaaagagcagagagtttttatttcagttttaattgtagatgaattaaaagttgatgatcaagtgaacataacttgggaaaggaatcaaattactgtaagtaggtcaggaaaggaggatatcggttttacatgtgtagttgatttaataacttttctgaattatgaaaagctctttgaccaggcaaggagaagaaaaattttaattgatgattatacaaatatgaaagggttcaccaaagaaacaagaactagggagaaggatgcattttattcggtattggcggtggatgaactaaaggtagtggaagatgtgaatatagagtggggaagggatcaactaactgtaagaagatcaggtaaagaagctgcggggtttacgggtgtagtggatctggtggcgtttctaaacactgaaaaactttttgaccaagaaacatatgatggggttttaatctacgataatcatgaaaatttaattgggataaatttatctccaatgtatgatgcaatgagcaccagtattgaaggaaacaaagaaaataacgattaacagaatagagggttatgcgtggttgtagatttggtggagttggcaaagttgtccgaagctgatttagtaaaggaattacgtaaagagaagtatcaaggcaataagtggttggttgaaggtaggataagacgactgattaatatcattaagggggatattagctgcacagagtgtacaaatagggaaagttaattctctgtggaaaggaaggcgaaaaaccaatgttaaagattgttttacatgatggtaccgagtatgctaatgatcctaagcttggtcataatttagaaacaaaagaagctatacaggaagttattgatgaggtcgggtattacgaaattttaacaaagactggttgggatcggatttataggaacgaggtaaaagaaattgtataggtggttaagggggaagtggggggcatgaagatgaggagtatagatggtaaggtggttttccgtaggggtactggcaagtgtgcgtgttgtgaaggtggtcatgtttatgagaaaaccattcagattgaaccgtactcacatccaaccgtctcggggttagaggttagatgtgtaaatgacttcataaatgaggtattggaaacatctgaggatattgaaggtaaaaaagttaaggtaactgttgaattttctgactgagggttttaatgtgcatcgcatttatttaggaatgaaagagggatcttgatggttaaattggaagactatttattgaaaacaaatgcacaattactaaatgagtttaaatggggtactcagggacaaagtgagttcaacaaatttatgaatttagtgaggaaggcgtctgatcagaaagaacatcgtggtgagatcaactgcagttataaagatcagtaagtgatttaatttaacggtgaggggagatagtatgaaaaggtttgaatatggggaaataacgactgcacaaaggagaattgacgaagaattttcctttcgaggtacgatcgcgtattctttaatgaagttactagaggatattggctcaaagggatgggagctagtcggagaagtaaaggggaagataatcgtaaaacgtgaagtagaatctgaatgaagagtgtccgataccattttattcaccggaaaagtttaaaaaatatcatgatgatttttttaataataaagattgtgttaagaactttctaaatgatgtagctataatggggggagtttttaaatgttgaggggtaggaacatcagagttattaagaaaaataatgtggagagaactacggttggtctggtttataatatctatagggattcaaaagggtatcatgttttagatgatttttgtgatgttctctatgtggatttagactgttttgatgttttgaaacattagtcggagaaattagatgaatatgtatttaattgttacgagaagtggaacttttatagctatcgggaaagatgaaagagaagcgaaggttaatttttcaaaagcctttcctaacgagaaaattagggaaatagaaaaacataaaggggagtctattcaagtttcgcatttaatgtgggacttagattaattggggattgatagtatggggaggttacggatgctgcgggctattgacgaaagggttactgagtatgtttcagatctacatagtgaagcggagagggttaaaaaagcagtgaaggatcctttatttctaataaaggatttttatttaggtagtggatccgttaagcagagaaaaatacatagtgtgttgtttgatggtgtgaaggtgcagcagaaggattttagggaacaagcattaatcaatctaaataagttttgtcgtaatattgatgatagtgttatgtgtgagtgtaggagttctcctacgggtcattatattcttaaattcgatggagtctccatcttacggtttaatattatgaaaaaggttttttctgatgcgagaatatttgaaagtgaagagcagttaagtgggactatcaaggatttaaagaataaaattaacagtttagagtgtgatctaaataagaagaggaattggcgaaaagccccgttaaaacatttaatattggggaataatcaatatcttaaaaatcccttcgtctatataaaaaatcagttaagagatacatatataggtgtgtttaaacgggtttgggttatagagcggttaaatcaaataattaaaaatgatgaaattttcatacagcaattggagtctcaaattaaagattatgaggatagaatagtgtatcttcgaaacaacaaaccgttgtgggaagaaaagtactttttctggagtcaggagtttaaaaagttggggtatgaagaagtagataaacggtctagtctagtgtattgagggtcaatcgtctgtgtctttaaaagtcaggacaattgcaatccaaattaaaacgcccagcattaaaaataaaaaggtaagaaatagccatattgggattgacatgtggatcgcccatgtacgagagtcactcttagggtgaccaaaaaatatgggaagtatacattttgatacaaatgggggataagggatcaaaaaattgctgtaaaatacgggtaactgggggtttgtatatgaaagcagataaaaaggaactactcgataagattgcaaagagtataggagatatcagaggatcgttaaagtgtgttgagcagttggaggatcagttaggtgataattacctcactatctatgacacacttcaaaaaagattacaagagaagacggagtattggaagtttgtaaataatacgtacccagatgtctttcagtatgagagtaagagaggtgttcctttactgtctcagtatacaaaggatgtgccggttcttacggtggagaattccgataagtggtatgagttgtatctaattatgccaactggtgatgtacgtgtggtcgactggaacctgcctgatttaagtgatggttggagagatcactgtattgttccaagctcgtttatggatcttgcaaggaataatggttggtacgttggttgggaagttttagacaaggtttttgaaatgtatgcagagtcgattttttaatgatacgggagttggtgtatcttatctggggatttcaaataggagaggatttcgggattgcataattttaatgagggaatagaggttaaaccattaacaggtttttggaaggggtttgttggtgtaattacagaaataaatatacaagcagatcccccaattattgttgagtttgaagatagtgagaaaaatggttattacgaaaaccaattagagatagtacaaaaataaactattgggggaagagttttgggtaaaacaatgatcgaaaatttattagcagacggtatgggtaaaagagtaaagttcaaggctatggttaagtcatgtgataaaaaagtggcatctaatcagtcaacgtatttggatttgattttatctgaccgatctggtgagattatagctaaaaagtggtcagccacagatagtgatgttcagtttttcgagagtgctaagtatatcgggatagctggggatcttggcgagtataggggaaaacctcaaatgacaatcaccaacttcaaggaacttggacaggatgaaatcgacgtttctgagtttataaaaactgcgcccgagtctgaagtgagtttaatacaggagtatgaggggttcctggacaagatttctgatgatgcgattagagagatttcttggactgtgtatagtaagtttgctgacaaatttaagattttcccggcggctaaaaaaatgcatcatgcatatattaatggcttgatttatcacacagtttctatgttaagattggcggcgcataaccataaacagtatggagatactgtgagtgttgatatggatatcgtttatggggctattgccttacatgatgttgctaaggttgttgagtatagcgatcctttccagccagagtttactgacttagggacaaaggttgggcatattgtgttggctgctatggagatcagattggcgttggaggatttaatccgtaaaaaaccggatatagatacgagtaaggtttatgatcttattcatgctgtgttagcgcatcatggtaaaaaggaatggggttctccggttgaaccgaaaacaaaagaagccggattagtacatcagatcgatttaatggatgcgactataaaccaacaaggttgaacttgatatttgttttgatggggtaggctttttccgcctacccattaattttaatgtaggtacctatctaaaccgctccaaatttacagaatttaattgtacattcttctaagggaaagtgataaaattgatgatggcgcaggggtacaccctgtgtatgtctattttaggaggattgtacatatggcagctaaggagttaaaggttatactgaaagatggggagaaagagtcttctattaccctgtctgaatttaatgaagatcatcagttagcagttatagatgggttctttaagttctttgatgtgaaggttgattttaaagagatgatagaggtatatagacggtctggcaaagaatataaagagttttatgataaattagataagcaagaggagaatagagaggatcgcgacattaagagagagtttgaggaaggatatggtactatagataaagaagataaatcagaagatgaaaaaagcgatgattataaaatcacgggaataagaatcggtaaactagggaacaaagcttataagtgcaggtataagtgtgaatgtggagataaaggtaaccattatattgagaagtatcgaaaaacagttacgtgttgggagtgtcaaagaattctagacgtgcagccggcaactgaaaacggagatccggtagatgaagataatttagaacagtaccaggatagttaccaaaacttttatgtggctgggctgcaggaacctgaatataaatttaaatagggggttgctgtgtgcaaaaagatcgggtattttcgagtgctattgacgatatggttagcgtgctgcgtgaggcggatttcggtaatctgaaagaaacagaggaaaaaatcaaccaatattttaacttattgagggttttacatagtccgttagtgttaagtgatggtggtaaagaagagaactaccctgacaagaatgaagatgttaaggggattcatgactctgattcggaaattgctgaaaaggaagaaactcagtcaaatgtaaattcttatgttttggagaggaaactaaacggcggatggttaaatgaaattaatcgatttgttcctgaaaaatacataagaaaattggacttaggagacggggacagaatatcagctgagtacatcggtaatgagcgatttcattttgagttagttgagaaaaacgaggatgcaaatcggcggtgcaagaggcgtgaaattaagtacggggtagttaaaaaagtaggtgaccggtatttagttgaggagcagcttattgacggtggaataaaaaatattaaagtaaacggggacttgtgttcttttcttctaaccgattttcatttaaatgagtttggtgatgatctggagatagaggatgggactatagtggacatagcatactgggatggggatgtaaccacgttcaaaattgtttgggtacaccctacagatactattgagtataaaaagccaaaaccctctggctattataaacaaacagagaacaagccaaaggaagatatgacaaatgatcttaaagggaaaaacgttttactgatctgtggagaaggtacagatgattcatttcgagtagccgtagagagcatgggtgggaatttcgttatgctagatgcgggtaaaccagaaagtaaagagtttatgtcacggatggaaagtaaaattaaacaagcagactatgtggtgattatggagaccaggttaagccataataagtctactagagcggcaaaatgttgtaaggattttaatattaagtttgattacttaaaggggaacggagtaggaagctttactaatttaataaaagaaatggttgatcaacaaccagttttgacctaaggatctctctttgagggatcttttatttttgattaaattgactatggattacttttgtagtaaactatatgtataaataatataaggagtgtgtagatggttggcaaaaaatcgttgtggatacgtaagaaaactaaaggacgacgggtattgggtacatatttgattattcaagtgttctatcttttgatcggttagatctatgtactaaatgattatttcggttccaaaaaatatgcagtaaaaagtttctaaggacattgaaaaggaacacatgttcgtgtattatgtaggtagaggtgttagtggtgagtgtaagtgaacaggtttttgatcggactaaaaaattaaaacgtgaaattttagggatttatactgagtctaatggtagaccggcagttaaaccgaaagtagagtgtcctctgtgcaaaaataaaacagatcactatgactgcttttgggatgtaaacaagcacattcttttttattgtgactcatgtgaatttttgatgagggaatagtgaaatgtaagggaacctttagggttcctcttttttaacttaatcgatttctatgtatttttggattgggagggtactatgaattctactttgtctagtggtgtattgggagaggttttaaacgaactaaaagataggggagttccggttagagttgaatgtgatgggtctttaaatgtggacgggatctatatgggatgcagcgtacttattagggaaagggaagaaggaaaggtcgaggttgtaacaagtaagggaaaagttagtgaattgaagtcttttcaggatttagtggatttaaactataggtggtttaaggattcaagtaaggatgattatccggatacgctttggttagagattctttttgattacggatatgttaaaaaagaaataacaacagtggtggtgtataagtagggtttattttggggggttaagtatgtataagagtatagaggttagtggaaaggttataaaaattgggttaccagattttgagggaataaagaatgggttgtatcagtatgtgtatagcaaaaatggaggtttaaacaggttgttttttcttcatggtcgttcggcggatcgatcatctgagggggaagtgaagcgtgatctagacgggatgattgattacttagatgggttaaaaaacgataagggtttccttgagtccttaattaatcagatgatttttggtggcgttgaggtgggtagtgaatccgagtatgtgttgaagtcaatgaggtactgtgtagagaaaagggtagtaaacggtgagaccgtttggaacgttccagagttagttttggtttatgttacggatagtgcgtttcaaatagtagttaggaaccaaatgtatagattgtgagtagggatatagtttcgtctagatgtgttaaattggggtagagtaaaagtttagggggattagtgtggtaaagaatgtacagtgtattaatgtagaggatgaaattaaaaagttacggaatcaaattattgttcacgatttaaggtatgctgcgggtaatccaattataactgatacggagtatgacaaactgtatgcaaaattggtcactttagagcaaaaacatccagagtacgaagatgcggagtcgccaacgaagaaaatttattcagtacttatgaaggaattaaagaaagatcagcatatgagacctatgttgtctttagaaaaatgccatacagaaaaggaaattttaaaatttttaaataggtttgatgaggatacttatacgcatgttcaggataaagaagatggtttgactatagctttaacgtatactgacggggttcttataaaggcagtaacaagaggagatggggttattggggaggatgtaactcatgcaataaaggtcttacccagtgttcccaagtttgttgacacagataaagattttgtggtgagaggagaggcaattatcccgtttaaagcatttgaaaatataaataaagatgggaaatataagtcaccaagaaatcttgtttctggatcagtccgaacgttaaaagccaatatagcccgagatcgtggagtggagttccgtgctttcgatattatgtttaaaggtaactcaggatttaatcgatacagcgatgagagagatttcttacaacaactggggtttacattatctcaaagtaaacagtttacaaatacgccagagggtaaagagcagctggttaaatattgtttagggtttgctaacagtgaaaggtctaagcgtggacatatgttggatgggttggtattaaaggcagatagggttagggatcgcgaaagattgggagagacgtctaaatatcctaagtgggcaatagcgtttaaattcgattctttagacgccacaacaaaaataacgggtgtggtttggactttgggaaagacagggcaggtaacgccaaatgcggtattggagcctgttgagattgatggggtaaagattcaaaaagcttctcttgcgaatatagctaatataagagatcgtgatatcctattaggggatacggttgttgtagcccgtgccaacgatgtaatcccacaagtggtggcgccggttaaagaattgagaacaggggaagagaaagtaattgaacaacctagtcactgccccgtttgtgatagagagcttgtaatgaagaaagatttattgttttgtataaatgaagattgctctgcgaaaacagaaagagttttacagcactttgtttctagggatgctttagatatagatggtttaggaaagaaaacaattaaaactttgtatgaactggggttaattcagaaagtggaggatatcttcacgttatatgaaaaagaagatgaacttaaagagttggatggttttggtgaggcaaaggttaaaaagatgcttgatggggtggagaaagcaaaagggaaaccaatgtctaggttaatttatggattaggtgtaaaaaatataggtcagtctgttgcgaaattgatttcaaatgagtttaaatctgttgagacgatgattaagctggcagatgagggaaaactgcgtaatagcttattggggctgcaggatgtgggtgaagtggtcgctgctagtgttgattatttatttacaaatcaacggtatcgggagctgttcttgttctttaaagaaattgggttcagtttaaatgagccagttcaacaaatcagcgaacaagtagacagaaagttggacggtaaggtatttgttattacaggggcattatcggagtccagaggagttattaaaaagaaaatcgaaaaagctggtggaaaagtgtcagggtctgtttcgaaaaatacagcataccttgttttgggagggtatgatgatataacaggtgaggcagactccacaagttctaagtataaaaaggcactgcagttgggaactgaaatcatatcagaaaataaattacaaagtatgttgaataattaatgggcaataaaaaaactcccggttcattttggactaggagttttttgtattctcatttgtttgcagtagttggatgtgacggtgataacaggaaggatcaggagggttaatagctagtgtaatatagatattaaatgaggggcgagcttttcgatacgggtaaagtggatatggggaaattcaagataaaataattttattgaaagataaaaacacaaatggcggctatattgtaactgactaatttttatttgacagtagattacttttatagtaaactgtatgtacacaacaaaaggttgtgtagagatgttggggagtagattagtcatagtcctcggggttcaggctctggggactgattaaagtaagtgtttcggctaatggacggtttacacctgtctattagcggggacatttcccgaattgttttaaacaagtttgatcacctcctttcatccgatgtggatactgtaccttgactggtgcagtatgtcggataaagagtatttttgtataagtactctttatcgggcaatgacaacttagttattgtctagtgaggaaactcacttagttgtctggtggcggaatgtgtagacgttaatcaggtataggggaacttgtcaggtattgagggcacaatccctaaacgtgctggcgagaccgagacgatcattggcgtgggtatgcgctgtattgatactaagctaggtgatgtgatcgaccgatatcgattgggttggttgcggaggacggctatcgggcaagaagtaaaacgaggcggcgctacacgcctaccctatactatgtggggttaaaatcctcacccagacattaaaggatttaacctaccatttaaagtttcggaacgtagtgtattatgtgagagacggatggttaaaattttcggaacgcagtttactgtgtgagaaattacccggcaactgccgggttcctttattttaaaaaaattgggggaattatagatggttggattaacagatgtggaagttgcagaacatataaagagtctagacgctccattctttttagatgagaaactgtttacgcttgttcggtacattgagcagggaactgtaccgggtggggaagattttgagttagaggacgtagacggaaacaagcgagtttctaatgttgacgatgcagtatgtttgggagatggtttaagccatactatggttttaactgatggcaaggttatggatggggtatccgctgtttggaattcggatctagataaagaaatggttgtagtgggtattgatgatgaagaattctttctcttaaataagagagaagttaaaaatattggtgacaatgaccttatctagttatttgtaggggtgtgaactctaacaccccttttattaattaatgggggttgtatttttgataataaatgttgttgcagctctggtgattctatatgtatacttacctgaaatgatggggtttcagtggaatcaaagttttgcaagtaggttaaggaatagagtaaataaagatacatattttaacccattaaatttgggtgtattcacaattatggcttttgggataagtataatgtgtaccttgtcggcgtacttgatagaaaatcggattgttttagttacaggtgctttagcaaccatggcgttatttcaacagggatttgagtttaaacgaagaattgagaagtctataagtgggaagctgagtaagccagaatttccaagtaagctaagtaggctatcagcttttgttataattataaatactgtggtatgtgcctggattcagataataacctacattaatatggcaccgtaatatctaaagttggaggtaagtttttatatgaattgtgtttggaaatacaaattagatcatatggttcagaaagtagagttaccggttggagctaaaatactctcagcagtcatccaagatggtcatgttgtagtctatgcttttgtgaatagcgatgaagagaaaaaggaaaccgtagagtttgttactcaatcgacaggagaaagttcggttgagcgtttaaacgagtatacgtttctcgatacggtgatgacagctaatgggttggtgtttcatattttttataaatgataattcagagagggtttaaagccctcttttttgattgttctacatataatatagtgagacaaatttgttaatgtggaagtattaatcgacggggggttcgttcggtaatggagtggaaaagaagatttggtgtggagaatgtaattataagttcggaggtagacaggtatttaatagatgcagggtttgttgtcgataagtttacacccagatttataagggattctgatgatgattggtatgaaaaaattaaaaaccatggtctaccttgcttagttttacatgagaaggatccggatgatccagaacaatatttaagattatatataaacgaagaagaggcgtatttagaggtcgagacttcatacagaagttttcacagaaattattatagggaacataacgttaaagctgttgatgaggtagacgagctgctgaatgacatgtgtaggatttaaactggttaggagtaggtagaggtaagcttagagaggggattccctctctttttttgatattgataacaaggttggattgcgcgagtaacaaatttggtaaacttaatttgctaataagggtttttaagtcgatttatgatgatttttataaaaacaaaaaataaataaaatcctttttttaaaacaaaatctgatttttatttaacaaaaggatatttaaaaagaataagtgactggggaaccttttttgattaaaatcaagaatctgaatcaacttccgatatatttgagggagttatatttttgtccaaaatcggaggttggcgagtatttgattattgattaaaaaagagataaataaaagaggataggtgttgcgagtgattcagtttagtaaaggtaaggattttggtgagaataacggttgtttaagagtagaggatgccaatgtgatatgccaaccgctcacagacaaagagaaatcggatatgatacaggtattgggtgcaatgtttaggttgtacaatttcgatttgttagtgaggtaggtgattgatgtgaaaagatgtccttattgtgaaaaagaactgggtgtattaaaggtggattctcttggtatagatgtgttgggttgtaatgattgtggttgggatgaagattctaaacaaaaagaagatgttttgtctgaaatgtcttggtatttgtaggggtgatgatgttggaagaactaaagaagtatttaaagaaaaggatggctcatgcagctaaaagagttgatgggttgaaggggaatccgaaccgtagatatgatttggggtactgggaagggaagttatcaacgtacgagggtcttttagatacaatcaaagaaatggagaaactaaaaaccggtactagttaagtgtaagaggaattaggtatagatatataaatggttttgaaaagaaaaagattgttaggttaacctatgatgtgtctgttaaggggtagggttaaataaagggagatgtagttaggtaaggttaggggtgagagtatatgtttttcatgagaatgatgattttggggttgttttcactaacagcgtttaatttaatggtgtggcaaggtattgagatggttcaagcagttagcagcttatttggtaaccaggatagttaatacatatccagtagtctataataatgggtaaataaagatacgggagtgttaaggatgggtcgattaaaaacaaaattaatctcagtttctcggagaaaagatgatttggatcagaaaattaataagttcctagaagatgaggggatcagcggcggggacttaattgatataaagtatagtgtaacaacccaaaaaggtgtatcgacagatttcattgttgattcggctttgattatttatgatggggaggatgatgattttgaggttgagtcaaacgatttttaataaacaatatgttacaccgtctactttgtttaagaagcgggaatatagcagcctatcactaaatgaacaatgggagaaagcggtacaggatgggtggaggttcgatccgctctacggtaaattttataaataagggggttctttatgggggaaatgtttttcaaaaaacagaaaccggttcatgatcttactgatgaccagttggatgaggcttttattctgtataaggaaaaggttcaggatgagttaatcaaagatcttgaaaaaacttataatttttctttagacgatgaggatacagtcgattttataaagcatgtaatagacttgggaattaaagaggggatgagtattgctttagatactcattctgttacagattattataaatcggtcaaaaacatagagacagatccacgttgtggggttgtcgtcaaagaggatgattctttttacggttgtggtgtgggtgagcattgggctacattaacggaaattattaaatcgaggtataagaatctgtacaaaccatttatagaacttacgaatataaatccgggtcttgacgagtatgggggaataacaagggttgatttagattcttttattttaaacaacttccgatttgtcggtgagggtaaaaagttactgagttatatagaggatgctgcaggataataaggatatgggggcgttatcgtggttaaggagattgggaataacgggttattaacatcgatgaagatggataatgacgtacactaccagtggttatttaattatattaatggtgcgttcgaagataatgaatatcaaagaaaagaatttgaaaatgtccttattgaaacaattgagtcagttaaacaaacaggtcaaattgaactcattaatagttggtgtggtcattttgatttattagtaacaccggagcggatacatcttatattgatacataaaagttttaagttgcctgaaatagaagaggttagtccagaatgacggatttaaagagaggtcaaagagttaaatgggttgatgacgaaagtttaggtacggtggtttgggtaacgaatcgaggctcatttaaaatactgtgggatgatggtgagagtgtggagtatacagagaatcttaggagtttaattgatatagtggaggtttaaacaatatggctacggtcagttttaattcagatttcaagctaggtacggatgccgctcaacaattaattaatgcgctggagagttcagaaccggttaaaacgagtgtaggtagtgaggtagtagtggttaagaataaagaagatattaaggagattatggatagttgcgtaaactaattatagagtttcataagcagtacttcaaaacaatcatttcgatctgtttaagttccttaattctcgtaacaatcttatatcctctatacaggctgctggtctacagtgtatggttgggtttaggtgtaatcggggttatatgtttattattgttgtatataacaagaggatacgggtaaggtggggagtattgattgaaggaacaggtaaaaaactccggaaatttcgaggagttaaagaaggtatatgatttgaacaggaagaggatttctgatctacagaaagaaaatgaaaaaatacggaagcggctacaggatgtttgttctcataaaaacgtaatgaagttggatggggaatttttagatccgtttgatgaagaagccaatacagatacatataagtgtttagattgtttagcggttataaaaagtacatgaggatctatattcgtttacaggtgggggttaggtattgtttgctcatgaaacgaaaagagagtatgcagcaagggaaaggttgtttgtaaagtgtttacgttatacggggtgtttaaagttagttgagaatcagtatagctaccaagacaagatgaggtacgattgtaagttgcgggttgttcaccctatctcatggttaatcatcatattgaatcttattacgtatgggtttaatagggagactatcagagatatcaaaaaggacttagtgttttggtaagtagtgatgtttggggtgaagagggtgccgaatagttttatgccttctgcatggaagtgtccggaatgtggagaagcaagtgaaaaatacattagttggtcagttgtaactaaatgtccaaagtgtaaagagttattatcctgggatggggaaaaggtaataacatacgatgaatggttaaagaatagtaattgatttagtctgttgggttactcgtaaatgtgggtaacctttctttatttgacaaattaatatatttaatatataataaatatataaatgataaagggatgaatgtttgatgagctgcatgtctgacaaactaaaaaagttgataaaagatcacccggattggactcaacaaaggttggccaaagaattgggaacatctcaatttaacgtacaccagctcatttataaaaacaacattgagtatagggacaaaaccataaagaagtatagtgagtcagagttaatcgctgagattaggaacttgattaagtgcaatcctagttggaaccaaaatcaaataggattaaagctgggaataccgcaatcacgggtgagttttattattagacatcacatccctgaatacgtaaaaaaatacagaggtcatgtaaacaaacattcttagttaggtaaggtaggaggttgatttagtgaggggaatggactacatagcgtgggatccaaagcataaacatttatttaaagtaagggagtggggtcaaacctcagaaggtaatgtatgggctaagagtaagcgtaatggtttccagcattggaatcctgagttttttcaatttacagggaagcgggagttcttcgaggacggtacacaaggtaaaaaagtgtatgagggttatatagtgagaggtaggtttaaaaatagggtaagtggatccggtttctcaatcgaaggagagattcagtatagtgattacttttctcagtttatgattatgtgtaatggtgtaggttatgggttaggtggaggaaatgattattaattggtagggttagagattaagggtaaaaaatactgaggagtgtgtgggttactatgaaggggttaattgaagcttggaaaagtgaaattgtctttgtaggattattttccgtattggtaggtattcttgttgtggttgtggcgaatttcggacattaatggtacataaatggttaggaaaagcagaagaaaatggtaaggtatagatacgaacaataaggtaaccgatagttgattgtttcacaatttttaataggggtgagtatgtctgtgggaagaaggatgtctattaaatcaaaatacccaacgtctgcttttgaaaaaaataaggaaaagcaaaaagaaatcagctctggacaaaaaaaggaaaaacaaaaaaggatactggaggaaataaaaaagaaaaagtccaagagtggtgatttaaacaatcacaaaaaagaaacggatgatagtgatttaaagtataaaaacttatatagggagtgtaagaaggagttaaaggcaattgaaaaaaagctgcagaataaaaatgaggaactgttaaaagaacgttcggaagtagatttaaagaatcaagaaatatctgtcttaaaggataaattgtataaaatttcagaaataaataatgatatcaaagcaaattatgagtcattgaaaaaagaaaaagatgatatggaaaaacatctgaatgaagtggttctaaacttacagatgcagctcgatgaggctaaccagggtttagaaaacagagaatacttcgataagagatttgaagatatcaaaaaagataataaaaattttcaacgaaaaattaacaggcttaaacaacaaaatacgaaaaaagatgaaaaaatcgacaagctaaaaaaagagcttgatgacttagatctaaaattatatgagcagcgtcaagtaatcgaagcgtacacagatataaatcctgattttattctccacacgcttattgaatcgttatcacctgataattataagcaatactctttagcaaatgatttgtctcggaagttacgtcggatagaaaaaggactgaggcttgcaaataagctacaaaagaatgaagatgttgatacaggaaatgagttatacgggcatttgtataaaaaatttgatgatttcttatttgttgatttggaggggaacaagtacactatagccgggaaacctaactatggggggtatatcaatgggataccggctacagcttacctagtgggtgacgatgccgtagtagttagttatgtttataggaagtatctaaaggaattcagtagggaagcagaaatttcacaaaatactaaaactaaagaaaaagaagacaaaaaagataaggatcaatttgaacctattggtgatttcagagtattaatagtatccagtcggaatggtattaagtatagggataggttaaaattacatggacttaatgctgataccgttgacgggttcgaagtaaaggcaagaacactggagttaatggacaaagctgatgttgttattttgtgtgtagacagtatgacacagacgtttaatgactatgccaaacaacaaaatgatcctaagtatcagtatatttacagagccaatgaagaaaaagttgtttcgagagtaatttatgcgaaacatatgctgggtttataaaaatagaagagaaattaagcggggaaatatggataatggttaaacagaaacccttgatctattggggttttcagttgaattgggaacataaatatggtaatataatagaggttcagtcaacaaaagtttattatcatcttcttaacggcaaaagtaaagaaactaatgagcaggactctgttctttacataaatttagagaggtctaggtacctctctatttttgttgtgaaaataaaatttcacactcttttaaatttttagaggtctttcctctatattatatatagctgtaaaaattttaattgaggtgatgagatggacaaacatttaaatggacttcaaagattcataattatggtctggggaagtgcaggaaacaaaatggcggcagggatggttgctgggggaatgggtataatcgggacgagcgtaggaacagactggattcaaatggggctgatatttctagctaagatatttaaaataaacgtggatgtggttgaggggggaagcacacttgttggtgttggtgccggagggttcttagtagcgggaggggtttggctttatttacacttaaataagaccaaaggttaccaaaaaactaaacaagttgcacggattgagcatgtttctatagaggtggctgatttttcacgaataccaaataagcaaaacgcagctactttagttcataaaattgatcaggtagatagcatgcgacacttatctgaaatgggtataaacaatgcactattcatacagaagaaaaaggttaattccgtactaaataggtatcaggacgatgatgtaaaaccagaggttgtagattactatgggttagcccatataccatttacaatccttcttgggtatcaaatagcggacaaggttaaagtcggatttcacgagtggaatcaaaacaaaggtgactgggttgagattaaaaacaaaatggaatcctaccaaaaacttatattagataaaaaccagattcaaaacccgagagatgtgagtgagattattttaaaagttgggatgactacctcagttgaagacgaccatttaagtggtttgggattagatggtttagatacgtataatcttcatttagagaacccggggcgtaatcacattgtaagtttgcagcaactacaggactataaagtaaaggtaagaggtactctcgatgaaatcaatagaacgtatccaaaccttaaaaagattcatttgttttattcgggtcaaatgtcttttgcatattgtttggggagtacgttttccccaaggatggatccacaaattcttgtttataatcatgtttttgggggttctccaagatacaattgggtactgccgcttaaaaaggcgcatgaaaatatagaagcaaaattaacccgggaggtagttgtagatgatgtatgatctgagtggtaaattcaatactttttatgccaaacacgttgtattgcagcaaaaacaaaaatccgatttatacaagaagaaggacattaatatagagaggctaaaagagggtttacaggcttataatgaggataaaggtacagattataaacttgccgaggagccggttgtacagggaagtgtaaccatgcatacggtaactcaaaatgatacaaatgattatgatattgatgtggctatagtgtttgaaaaggataacattccagaggggacaatagcagctaaacgggttgtggagcaagctttacttaaaaagtgtacaggttttaaggaaccgccaaaagcacataccaactgtgtgaggattgtatataaggatgggtatcatatagactttgcggtgtacagacgttataaacagaatgagagtgatgacgagtatacttacgaacactgcggaagtgagtggagagaacgagatccaagaaaaataacaaaatggtttgtggatcaaaacaaaaatgaacataactataagctgcgtgaggtagttcggttattgaagatgttttgtaagtctagagatacgtggacaatgcccgggggattgattcaaagtgttttggctgacgaaaagtgccaatcacaatatgatcgtacagatgagcggttttactatacgattaaagggattcgagataggttagagatctatcagggggtattcaatcctacagatactacaaaaagtctgacgtacacagataaggacaaacggaaggtaaataatctgtatattaggttagatacgtacattaaaaaactggatgttttatttgaagatggttgcacaagagaagatgcaataaacgcatggtgtgaatttttcaatcatggttactgggaagaacaaaaagaggagcaccgtggatcttctgaggttcataaggcatttagtgaggtagcggctgctgttccgtaccgggtctttactgaaacagaagagtttattgatcacttatttgcggtcaatcttaaatattcattagagatcaaatgtgaggtagcaaggaatgatcaagtaattgggactttggataattacttactgggtcgaagaggattggagtccgggttaaggttagggttcaaagcggtaacgaatgcccctgagccgtacaaaatatattggaaaacaaaaaatcgaggatctgtagctattgaccgaaacgaagtcaggggacagattttcgagggtttttatccagataatttgcttcatatcgaagagacactattcagtggtgatcattatgttgagtgctatgtggttaaagacaatatctgtgttgcaaagggacgaataaatgttcctatagtgtaaataaattggataaaaacctccttacattggaaacgaaaatggtttaacatggagaaaatcctttatacatcttagaagatcctaaagaattgttctttgggatttttctaaattttgataagtcatactattaggacatttccagtttaaaacattatggtaaaatgatgtagactatgtgagggggtttacaatgggtggtagtttgctgtcgtcggctgaggttggggttaaaataagcaagtggatgtatcatattagaaaatttaatgttgcagatgctgagatgtggaaagcagaaattaatcgtgatatggagaatgtggagtttgaccaggacttaaagttgtataagcagcttgtggattataggcatgatattatgttatcgcatgttaaacccataaatgttactagggagtatgttgatttcggggagttatctcatgaaatagagtttcaaaataaggaaatgtccgggttactacattactatgcgtacttattccgggggatgagtgaatttaggaacggaaattttgttgttgcaattacttactacaaacaggcagaaaagtacgtggttaatgttaaagatgaggcagaaaaagcagaatattattttaaattagctgaagtttattacaatatgaagcagacgtatttttccatgcactatgctgtcttggcgagagatacgtataggaatataaataactatgggaatgaagtggctaggtgtcaatttgttattgcgggtaaccttcttgatgcagaaaggcataatgaggcgttagatatatttaaagcggctttggattacataaaaagtggcggcgatcattactttcttgggttagcctattataatgtaggaatgtgtttacaccagatgggaaggttaaatgatgctttggggtatcttgatgagagtattaaaatctatcggaaagagaactctcataacctaaaaagagccttgttcactaaagcccatgtattatataagcttgatcgggatacagaggcgaatgtattatgctgcgagggtgaggagttatgcaaaaaatttgaagatgaattaacctccgcgaagtataagttcttaaaacatttatatatagagaaggagaattcatgtaaaatagaaggtgacttacggatcctggaggagaatgatcatcttgcggatgtagaggaacttgctattgatgctgcggattattatacccggatcggtaggttagaggaagccaataagctgtataaaaaatcgatcttgaccagaaaggaaattcagagagggggtattttctgtgaagattatgatggcagcggcaatgttaattttttctctaggacttagcttttctagtggaggtacggtggatatggcaggacgtgcgcatacttcgtcgattggggatatgcaactagcagatcgtgctcatacttcataactgttaaattgacatttttataataattgagtataatttttttgggagtagagtttatttatctcggaaaagcaatgcatcacgtttaagacctcggttaactccggggtctttttgatatgaacaagtgagttggacaggaagatataaggtatgatatagagaaagtaaaatatctggggggtttattaattggaagtaagtgaaggaacaaagcatggaaagatctcgtatagtgaagagcaaaaaaggaattttgcaagccagttgagggatcttattaacgagaacccggattggtcgcaaaagcagttggcggaggctgttggaatttctcaatcaactgtgtaccggttagttaaaaaatatggtattgggtatgtaaaaaagcagagggtacataaacaagaggttcagacaattagtggagatcggttaaaaaaattgatgggaaggcatcctgaatggacaattagtcagttagcttatgctataggtgtacctgatgaggtaattgtagcaactatgagaaaattcaatattgaggcaccaaaataaggagagcagtcagctctcctttagaatttttctgggttccatctagcagctacttctttttcacgttccagaactttttctaagtatctttctgttgttctccggtcttggtggtgtaatgcctgttgtatttctagtatgtcagcccccatttgtcggctataaattgcaaagaagtgtctaaaactatggggagtgatttttgattcccgatgctgtaaaaaaggtaattttgttttctcaatctctcttattacaaagttacttaaatttttattagtatagtgtttacgtttttgggttgcgaatagtgggctatcatctgtagggtctaaggatgtactcattcttcttcgctttcgaaacaacataatgcgttcaaaattgactaaatgaattaagcagtcaaaaggtttatcccccttccctactccgcgaagtctgtactgtccggttaatggatcatagtaaaggtctttcatttttgctttacttatttcctgtatacgtaatcctgtcatagctaaagtagttagaatcccgtgagttatcggattgctctcataaaaatctagaatttgcttaacttcatggtagtacagatccctattaggtatttcgtcttttgagattgctgtacttagcatgtgcgtatgtaaaggatgatctatgtaagagcattcatatagatatttaagaaagcttttaatgacagtactcttgaaatctagagtggctgcagagtatggttttccttttcgacctaaaggagccgtacttagatattcttgataagctttaatgtgtctaggacgaagattctttaataaagactcttggttaaactcggtaacatcttgaataaagaactctttattttgtttcaaataattatagaattggagaagaactctggagtattcaatcttagagtttgatgatctgtctttagattttctgacatgtttacgtttatgaacaaaataatatataactgcttcatccgttaattgatccattgtaggtttgtttaaccgctcattacttataataacatcctctaataatgacatagatgaatcatctacaataatatcagcagttaacatattttgattactgtctgatatttggttattaaatagcaccaattgattcatttaattaataacctcgcttaaaattgtatcaattaagaaatcttatacatgttgatttaaatatatagatcaattgcttaattgtgattttattataacaatatttaaagatgctttaaatgcaataatgaagataagtttatgatagacataatataatttgtagaaaaagtgcctatttgtctaaaagtcattacatgattataaaatgctataattaaataaacttttaatcatgtaatgataaaattaattgtttaactcaaattaaaaaacatcaagaatatgatatactaataatgaatattcgaattgatggagtgatgtatgttggataacaatattgaactaaatgatcataatattgaggaaaaggaatacataacaactaatgaggctatgaagatacttggagtagaatctcaacaaacaatatatcggtatgtaaataaagggatactaaaccctgttaataaggatgattggaaaattgatggtgtatatgagtttaagtatactgatgtaattgaattaaaggataacctaacacctaaagattacaccacgtctgatgttgcaaaaatactgggagttagtcagccaacagttttaaagtatattgagcaaggaattttaaaagcacacaaacgcaactttcgggggttggtgtataatttcatttctaagaatgatctgagagatttccaaataaaccataaaataggtaaacggcatactaagcaatctttttatgatcaaaatacaggatatgcattgtaccaaaagttcacacaaggaaatagtacggcgagaataatatctctaagtgatggcattaaggtcattaaagataactatgaggaggatattattaatcggattgaagatgatggttttactcctgaatatgtaatcgaaaagaaaaaagcggtaactaaggatgggtttgcaaagtttaagtttaaattgccggctgctgtagacaatcctgttttttcagtaattgatatgttttataaggagtttagtccaacaaatatgagattgaaaaaattgatggacgattatattcaaattgaggtaaagccggggttagtttcggaacaatattcaggattggttgatatgttacaatcacatataatagaaggaaaagtttcgctaagacggaacgggatttatattgatagcgatattacaccaattcgacttaaagttagtaacaaagtaaaacgtgagtttgagaaaaaagctaaacaatacgatatgagtatggatgagttaattgtagctgcggttagaaaatttgagttgtgataatgaaggagtgttttactttgtataaaattcgaggaattatgagtaatggaacggaactgaggcttacggacgacagtgaaaaagaagttgagtttacaacaactcaggaagctaacgacatgatagagcaacttaaaagaagtttgtcccgggatattgagtatcatgtagacccaataaaatagtagataaattttaagtatctgtagtacaatcattgttagacgttacgttctctttaaatattgatcgtttcggtcataaacctgtatttatgtggttacccacaaaaaagtcactctcaatgggtggctttttacgttttaaaatgggattgtataagaagaattaattggttcctgtgtgattgtggaacccaatcctttgttaaatttaaagggtcagtggattacaacgaaagatttgctcgttgtaaaagttagatctaatctttcagtttgtcaggctcaggggttagatttcttatgtaattaatgccgatcttaaatggtcggttttttgttttcttaaagttctttttcttgataagaatcaggggattagcggtctgaaagttttttataatgagtattgagatgaggattgattttttaatcttactttattaaagattttttgatttatatttaattcctgattttttaattaagtgtggtcagatagaacgtttagatcagtgtactaaatgattttaatgtttaataaaggggaaatttattttgtttaacaaaattgatttgccaaaaaaccccagaggttatttcagataaagatcattttgaaaaacataagggatttaaattaataaataatttttatcaaaaacctgtatcttcggataggtaggctattgatgggttaattgggagtttacagaacatcattttcattagttcaaaatagatgtagctcccctatttttatgtagatgaaatttgtttacgtataattagataatgaatataaaaatgatttttaatattgatattaatgaggatgtggtttaaatgaataagaggcagtggagaaagaagctttggaataccggggatacggataggtatgggttatgttttacaaaatatctgcaggatcgaatcgaccatggagattattgtgttgtgactaaaaacttcggaaaactccgaaaaattcatgtgagggagtgtaaataatatgggtattaatttagggagaatgagttatgaggaactggttgatctccgggctaaggttactatggctattgaaaagtctttatttcaatctgggtaccgagaagcgaaaaagcatgcaaggttaattaaaaagaaaaatgaactcaaaaggaatcaaaggattagagagaaaataattgtggaagcgaaggaagatgttaagcagctacttgagagaaataaacaattgaaaacgtttgatgtgtctttcgctgttcattcaagtaaagatattttaaatcgatggtcggtgatcgccacagccaagagtcataccagcaataaagaatttattgaatcagcagtttgtgctgatggggagtgttttaatatccatattggggaagcaatagcattacggagagttttggggttggaggttaaggatgtatatttgaatgttccacaaccaacagaggttaaggttggcgatactattcttacaggtggtcatgttgaaaaagtaattggttttgaggaagatggctctgtaatggttgagactggatgccttatgcattttgatcatttggatgctgataccggggatagaattttggctgattctgatgcggacaatacgtttgttctgtgggatgaggatatggtggaataaatgattgtgtataaaacaggcgatattttaatggcaactgaggacattatttgtcagcaagttaactgtaaaggagttatgggtgctggtttagcaaaacaaattcggaaaaagtaccctaagtgctttgaggactatagtttatatgttgaaaatcggggttatgatgcggatgtacttcttggaggggtacattattacaggggcaaaagtggaaaggtgattgcaaatttgtttggtcagaatgggtttgggagagaaaaacagcaaacagattacacatcactacgacgtgcttttcataatgtaaaaaataaagtcacctgtatggatgatcaagatggagggaagtcggttgctatcccctacggtataggatgtgggttggccggaggtaactgggatgttgtacaagaaattatagatgaggtatttgcagactatgaggtatccgtttataaatttaagtagtctcccctaccctgcttaataaaaatgaaattacatccgatattgataatgttgtatgaatgtgaaattaaaagcattaaggaggttaaagttgatggaggtgtgtgaattgcaaccaaaaataactttaaaaaaggcacaagagttatttgatcaagcaacgaagtatttcacagtagatcacaacaatcaacccgaggagtttatatggtattcaaaaaaggatcaagagttcagactaagggagcttcgtaacggtgttgttccaaattcaattgttgtctttagtgctgaggagatgtttgatcaatcactgaggtatgtaaacaaagagcaaacgaaaaaagactcggtgaggtacatttatgacaagatcaatcaccggttaaatctaatgcaaaaaagaaattatttatccgaagtgaattagtacggtctgttatggggtttacataaacgatggggttgtgacggtgtatggatggtgtaatggttgtggaagtatctgataatatttactcggtttgtttagaggtgtttggaagtattcatgagttaagggcggaaatagacaatacagttaggagaaaaagtattgatggattaatcttgttagatactttatttcattcaggtaatggggatgacaggttttatagtatccaagcggatcaaggcgaggttttatggagtacgttcaacatcagggtggttaaaaagagtgatggtgtaagaaagaaaatagctaaagtttttgctacacatagagatttgattgtaaactcaacattaacttctgtacaaaagagaatgttgggtgcgggaattggaatataaaaactccttgccccctcccctctttcggattaggattgatttataagaaagagtacgggagggttttttctgtctaaagataatgtaatcgagtttaaaggaagaagtaataaagcggatagtttcctggatgacaggtatattgatttcttggatcactttttcatctataaggagtttttaagtgctacggacagattaggtatagaggttaatgttactgaaggttgtgttcaggttgtgtttcctcctgaactaaatgaagatagtgtaacagttactacgggcaaggaatttattgacttggtgcattatattctagttatggatttgggggtacatttttcaacgaaaaatgattgactccctatttttatgctcgataatttttccatatcccccatctgtttatgtaataatataaaagatgtaaggttttagaagggagaaatgtcgaggatgaatcaaattaattctgcgagagtattcatcagctctacaggacaggaatctttagttgaattgcgccgcattgtagcggatcggttgtctggtgctggtcatttacctcttttgtttgaacataattttgggatgtggactaatgatttgttacgtgactgtttagctaaggttgatgaatctgatgtatttatcttatttatctccaataagtgtggatcttatacgcaggtagaccccaataaaacagttacgtatgcggaatactacagagcgagaaagggaaaaaagataatcataccgtttattgaggagcatatatttaagttctttttgaaccatattgccccacaattgcggcatcagattaattcttatgtaaaagagtatgatcgttatccggattctacatatactgttctgaaggattggtttcagcagttggagatttcaaaccctgtactttttgagcagattgaggaaacacgagtagatttatttaactgggcttttatttatgacgtgtacgttaatgagccttggacttatgttgttaaattggctaatgtggaaagagcatgtgaatttgttttagaatctttgagcggagttatccgaaaggctagtccttttttccaagattttgatggtattcaagaattattagttaatggtgatcagatgcgtgagtctttaagggcagcaaaccgatttcatgcttgtttaaaggatggaggattggatacactagaactacttgaggtgttaatgggttacatgaaaggaagagatgttccccactccaacagcccgttagatgaggatattgttaatcggttgtctgattgtgaagcgatttgtttgtacagacgtgatcaggattatttaaggctgcttgagtgtgtcggggatagtgatccaacttatgaatttatgatcaatgatgaaaattcatatgtagcagagacataccagcaaaacaacgatagtgttgagaacattttttataatgaagaaaagaaaaaattatatctcaccaaaaaacttggtgatttggttatatctttgcactatcgattactgcaggaagattggtcagaaaagcgtgttcagagttatgaaaaacaactattaactgctataatgaaagaaaggcgtcagtttgattttgcagctgatattctagggggtttattaaatgggaaaaaataaagcagtgtatattgggtcaactcctcagaatgtttcgagagaggcagaggaaactgaacttaaaaaattagaggcaaagagtaaagaaattcaaaacaatttaaagaagattaaaatggacaagggacaatttagctatacatgatttttgacaggttaacttgttagttgacttttattcgtggtaatatggggttagtaaagagtgcggcaacactctatcttttaaaaattatctttcctgatagtctattttttcacttggacactcatccgctcttttataaactggatgagtgtccttttattttcgatgaacataattattgatagtgtaaataatatcaatattgaaatcgataataatgtcaattgggttttcaatatcgaaaataacatcaaattttataatgaggtggtttaatgaaagactattacgaaattaaagaggtaagcaatcttgatactttaaataaccacataaaggacggctgggaaattattgagtcttatgctaatgaaggaaagattaagtaccatatagggttgacaaaggatactgttattgaaaatttacgtaagataatcaagttatatgaggataatgggttaaaagatgttctttttgatcgtatcggagatgaattaaatgatgatattaatgactatgaagaaacaacatatcaaccaagtttaaaccctctagtacagacatttaatttttatgaacgttgggtcaacggtaaagaaacaatgttaaaaaggaaagcaggaaaagagcgaaataatgatttagttgatcactctcttcccttttgaactgagataagttaatggatagcaatattaacattgatagtgataacaataatattggtaatgttattttaaagtcgaggagtgttttaggtatggagcgttatgtaattactttggttaaaggtagtgagagaaaaactgaaacctataatcttccggattcagttaaagaggtgtttaagcactgcaaggagaagtttgaaaaaggcggatggaaagttgaatctgttgatgaggaatcatattataaagcaaccaaaggaaagtaattattaatatcgattacaaattcaattgtaatattgattgtattagttaagtaagatgccggggagttcctcggcttttctgtaacttttatttgacaaatatataataatatagtataataaaattaacaaataaagagattagattggagataataaaatgatcgcaactgatattcttattaaattaaacacttgccagggaaagggagattatactgacacttattgtgtttatgctgctgattggtttccggtagggtatcttaatactaagtatagacaggtgaaagaaataattaaaaacaacttagaaaagaaatattgtgaaccgatggaggattttaaactgagatatataccgttaacggtgtttcataatggggaactaaaacctgaaaacattgttcaggcactattagacagagatcttattgaaccgttaaaaaatattaagggtgtatatgcggcaacagaaactttaaaaaaggagttggaagaaaacagaagacaaagacaattgaaatttattataagaacaaaccgggtcatgatgggttcctccaagtgggaacgactagagaataaaaataatgagggattaataaccttatctagcagtattgaaagatttgatagcatcggtaagagagttttagtgtaggatggtaataaactcgtcacagcgagtataaagaggcattaggctgtgagcgttccccagaagtggggaggttgcaacaaattaaggaggcatggggaaattgaataacgacttcaatgaactattattacggcaacttcaattaatgagatcatgtaacgatagtatagagcggaatataaaaattcagtgtgtcctattagttctacttggtgttgttggtttagggtttttcgcaatcatgttaatgttgattgtaaatgggtgactggggtttttacagactgggttacccgtgtatgtagtgattctataaataggtctttataaaattaattaaattatataaaattcgttggaaggcgggtcggttgagtgaagtttaaagatataaaacaatacataagaagcggtggttatgcatttgatgttggacttaggtatttacctgaaacaattaataattatattaatgaatatgggttggaattaaatccagattttcagagggggcatgtttggtcgcaggatcagcaagttaagtatctggagtatttgcttaggggaggtagatctgggatggacatatacttaaatcatcccaattggcacagtggtggagatggttggttcgtatgtgtagatgggttacagaggataacagcatgcttaaaatttataaataatgaaattaaagtatttggtcattattatagccagttcgaggatagagttcctctggggtttggtctgcgatttaatatcaatagtttaaaaactcgggcagaggtattggagtggtacatacagttaaatagtgggggaactattcatacagaggatgaaataaatagggttaggcgattattacttgatgaaaaggcttaatagttagctagtaacggctgaggatactacgagggatttagataataatattgattatactattgatatcaatagtataatcaatatggctttatacattcttgcgaggaggaatttaaaatgtttttactgcgagatactgactcaggaatagtttacaacgcacttaaaaatcctgctgcagtatttgattgtgaaagtggaacagtacataaaatcggtgagagagacaaaatgataaagtttcatgaagatatgaaatcaaagtataagcagtttgggtttgatgatattgctcaggatattaagtttatggatctgccgaaggatcaagaagaaattgataaggtatttaatatttgtgattatataaaaagactgtatcttaaaaaacaattacattaatgtaattgatagtgatgttaatattgatatttaaagatatgatgggcgggtgttaagtcaaatgagattaacatttagagacaaacttgccatattcaaactggcgaatactgcagagtctatcaggccgttaagcgccgacgaggtagtgcttttaaaagaaatttacaactcttgttctgatgaggaaaaaactaatattgaaaatgaagcggtatgcgttgtggagtatttatttagggactaataaacctggagacgtgagatttcacgtctttttgattgaggaagtaaaaaatgttgatgggttatttggtatcatatgtgtaagagatctggtgttagtgaggtgtaatggtgcaaatacatacaagcatgttagagggtaaaggtgaaggtgagtttcttccggaggatttttatttagatggtggtctttcacaaaaacaaatggatctgattgatgtcatattgaaagcaacacctaaaatgttaaaaaagcaggaagatattatacctaaatcagcagcagcactaaacagaaacagtgtgaagataacgttaaggttggcacaaatcataccggtgttgatgagctatgttaaccctcggctgtttattggggataagccgggtttggggaagactgtaatgtctgctgcttgctatagttattatagactcatgatgttaaaaaagggtttacccattaaaaaaatcttagttgttacagaaagcgtacacgtattggggtttggttcagagtggggtaattacgggattaaccttcttccgctcactaaatcaagtacaggtatagcgagagcgcttagaaatagcaatatggatgaatatgatggggtcattacgaactgggacggattaaaaacaaacgggtttctagattattatttacagcatgctgatgagtatgggtatgctgtgtttgacgagacaagcaaactgttaaaccctaagtctgttttatattcaactactgacaacattataaacaaatatcgtgggggaatacctcgggttatatttttaaacgggtcgagttttgaaaaaaatatcttcgatttttattatcagttttcaatattaaaaccgaagttgatcccaaataaaacatttcttgaaagccggtatgttgttagaggaggtcgtgagatttatacaaaagatttttctagattctcaccaaatcagcagcacgtcgtgaagagacaggtaggggaaattattgattataaaaatcaggctgaattacgggaaaggttaaagtactattatatagcccggagtaagagagactatacaaaagatcttcctgaacatagctatatccttcatggagttgagcttactgcagcacagaaaaaggttctaaatgaaaagaaaaacatctctttaataaacagccctaagacgtcagatccgaaagcgaagtttacggttcaaacatcacctaaacttaaagctgttttagagtttgctcaaaaggttgaagatgacagaccaatgatctacgtctataacaaggagtcgcagctcacgattaaaagtgaacttgaaaagatgggttatcgtacagagatactaaacggtgatgtaacggttagtgaaaaaacagacatcttaaaaaggttcaatagcggaaaactggatatgttggtatttaacgtagagaaggcaatgaatgtaccaacatccgatcgaatcattttttatgatatccccacaatgccgcagagaacgaatcaaattaagggtaggattgaccggaacaactacgacaaaaagaagttttatgatttcttctgttatcttgattctccggaaatgtccaatatcgttaggttggcgtactttagggaacaccatagtaatgagtttacaggtcaagtcgaaaatgtgtatggggcgcttgtggggcaattacaggttcattatagggaggactgtttagaagaggtcgaagagaagtttgcttggatggagaacaacaataaaacatatgaagatatacaggatgatgtagatgaaatactgggtctatcctgatggtggggtgagatgtaagtctcactccttttttatttgggtatgattgctgtaacaatcaaaatgagaaacgagtgttataagatgaggttaggttgttattaggtaaagttggatattaaaaattagcggaaataggtgagggggagattttatgaaattcaaggtaaagaaacaagtaatggttatcttctcagaaagagaggtgcgggggtacataaaaaatatagaggttaagggcagaagaaggttgtctgagttagaaaagagtattcaaaaagaggttttattgattcaaagaaaatacccaacagctaatgtgaagtggacaataggtgtagttgagcttcctgtatctgcaagtgcttagaggttgggtggttaggaaggggatttaatttgaaagagtttttaaggagtaaagccggaattgcaactttgactggagtatttggggttcttgttgctgttctggttgttattatttcggtaacgggttcacataaagcagaagcacaggtattaagcaaggcacagaaaacggtagatgcattgtttgctgatgatgaacataaagaactcgctgacgatatgaaccaagatagaattgacgctgcacgtaaggaagtaaaaaaggtaaaggatgaaaaagcacaaagccagcttacattagacattaacaatgctgaggatatgtataacacacaaatagaggcaattggtttagttgatggggttatagacagtgaaggcagattaaaagataatgttaatgaattagctataaaggatgcccgtaatgcagttgttggtgttactaaccttaaagtttatggggagttgtccgaccggttagataaagctgaaaagctgtataggcaacaggttaaaacaattgagagtgtccaaaagcttttcaaggatgaggagcataaagaattagcggacaaagtagataagaaaaagatcgaaaaggttaagaaggatgttaataaaattacgagtaaagctaaaaaagagcaattgttaaaagaagtgaagaaagcttctgatctactgaaaaagaaagaggagaagaagaaaaaagaagaagaagaaaagaaaaaacgtgaagaaaagaaaaaagccgaagagaaaaagaaagaagagttaaagaaaaaagaagaggctgagaataaagaaaaagaagaattgaaaaaacaacttgaagaaaagcaaaaagaattacagaaaaaagaggctgagttaaagaaacaaaaacaggttcaagaaaaacaagaggaacctagatcgagtgagtccaagaaaactaatcagtctgtaagtaaagcaggaaatacagtagcagacatggttccgggtttaaaaaataaaaacaaagcgataattgttacagataataagggaacaaaggctacagtatacttaatggagaaacgtaatggggtttggagtactgttgacaagtttgggtctattgtcggtaaagagggttttacccatcagtttagtgaaaactctacgggaacaccgattgggaatttttcagtagggattgcttttggtcgtaatggtaacccaggaacaaaattgacttggcataacataaagactggtgatgtgtggattgacgattctagcgacaaacgatataatacgttacagactggcgggaacggggaaaagatgaatatttcccagtatgattatggtttccaaattggttggaatctagatcggacgcctggtaaggggtctgcagtctttttccatgtatcaaacggaaagccaacattaggttgtgtttctgcaagtaaaggtaatgtaattaaaactcttaaatgggttgataaaaatacacgtattgttattgcaccacgtaatgaattaaaaaattattaattttagagacagcgtataagctgtctttttattatggttaggttgatagtaatcgaggtaacgagcgaaaggtattcgtgtacactatatatagttaagttattggggggtacgttatggcaagagattgtcgagtatgcggcggaaaagggttccgaatggagaagatcgatggatccctaagacgtgtagcctgtaaagagtgtgggggagtacgtaacttccgagataaattagaagcaagagagccatcagatagggagttggctgaatatataccgaatgcttattttagagcgattgagtttgatagagcggttttagaaaaagaaatccccgtacctatggcggtaagggacatatattttgaagtgtactatgactttatggagaaaatgatcgctacattacgaatgggtcaagtacctaaaaagagctatattgtcacagcaccagataactttgggaagaaggtgtttgtgtattctatgataaaaaacgctctaaggggaacttaaaacctacggagttaattgattctcgggatgtgtatgatcaacttgaccatcaaaattatgcccaattaaaggaatggtttaatgccgatattgcgtttatgacattgggtggtgcgccggctaagtcggatgcgatatcaatcaagactgttctggatatttgtgaacggaagggaataccgttaattgtgttgtctaggtttaacgggtcttattttacgaagtttgatagcttaatggctgcttcagtgggggtaaaagctacgaaggatggagattatggtcgactagagcagcaaggaatattcggggacacgttaaatgcagtcagggagtattacaatactcagcttggaggatccgttaaaaattataaagatgcacaaagaagagggtagaagtaggaggtaaagtatggcgttagtcattacggagcaggatatttttaaatatttggttccacatgaagatgttgatctaaatataaggtctaatactcgaataatgctgactcgtataccggttaacatattcaaggatgagtattatattttataccgggctttcgaggcagcgaacaagcacaatatttggatgggttatgagcaactacatcagatattgttgaataaccttgaggatataattgatgaccctaaagtgacactgtttgaagacgagcaactacctagaaatgaattaatggataaaatactggactatacactgcatgagtacgatgatttgtgctctttggatatcgaggatgtggataacttaaagggaaacatgcaattgtatatcgagacctgggcggttgagaaatcccgggagattactctaaataagctcgaaattttaaatgagggtaaaaaatttgggcgcattttttataagggggttgaggacgctcataactactaccaaaaggcttatgaggtagttagggcgcttttagaagcagatgcgggtaagctatctgagtcgattgatacgtcagtggacactgttgaggatattaatcggaaaatgcaggaggagactgttgcagaaccgattgcacacactggtgtagatcaaatcgacaaacagataacggcattttataaaggtgaaattgttgttattcaagcaggaactggtgtaggtaaaacacgtaaaactgtaaacatagcgtacaacgggttgaagcgtggaaaaaatgtactttatctgtccttagagcaaaaagctacacgtatatatccaatgtttttagcaaggcatattcttgagatgtatggtgatatagtcgagttaacggataaagatatcatccgaaaaacgtatagtatggtttatgagccgcagaaaactgctgcagagattgactttatccaaaatgaaaatattgggcggttaaagattgagggtcgttcgttaatggcgaatgatttatacaattatttagtacgtacatgggaagagggtttccattttgacattgtggttcttgactatctggggttattagaagttcaaggagggcgtcgttacgatgtgttaaccgaaacaattaacatgataaagtcggaggttaaatcctttaagggtaggggcttcttggcgattatacctaaccagttatccggtgaggctgaggatcagttggaaaaaggggaatacgatttattgaaaaaaggtggaagtgaaacaaagtatgtcagtagggcggcagattatgtgtacactttataccaaaatgatcgtatgaaaaaggatagtgtaatgagaattcttaatagtaaggttcgtttagggcaagcaccgcagccattttatatggctgatgttgatttgggtaaatgtgtgtttgttggacgaccagaggatgaagatgatgacgatgatctctaataagttggggtgtagtaaatggctgtagataagggacaattggagaaagctagggaaattctaattcaagagattccgctctcaaagtacattagagataatcggttagggaatgcagataatgaatcaggaaagattaattgtcctgttcatgacgatagttccccatctttttactacgatgataaccttaaaacgtgtaactgtttcgggtgtagtgttaagggttccgttgttgaattacactacgccattaagaggaagacagatgatcggtatacacaagttaaggcagtcagggacttatctttaaaatacaaggtaaagctgccaagtttatatgagcgtagtgtcgatgcaaaaccgaaacatcaacttagaccttctaaaagaagaaggcattcagatttgaacgacgaggtgatgtataaacggaagatagaaaagttagagtatcagataaagtttatagaagatgtggacactaaattaaagttatataaaataatcgatgatatgtgggaaggcaaaaaaccgtctaaaaacgtatatgagacattaaacaaccgaatcaaaaatcttagttagtggtgtagttggagggaaaatgaatgaaggacgtgagacattactatgaaataacggatcggaagaaccaacaaaaaacggttaagaggaagtctccggttttaaagagtgagattgaggaaccctgttatttatttttagatcagtcaacaagttctggttatgctgtgttcgacaataaatctcggttggtgttatcgggtgttgtacaaaaaggaaaatcctctttgcaggaatataaatatgggtttcgagatcttatacaagaattggtggatagttatggggtttcgactgtatttcatgaagaggtttatgatgccagtaacatgataacaactgaggtacttttctacataaaacatatgattcaggatattggatatttttctgagaaaatagaagttctaggcttagaccatatgaagtggaagtctgagttggctaagcccgggaaattcaataagtctggggatcacaaaaaacaagttaaggaacttgttgaaaaagtgtacccactggttgctctaactgcagaggatgaggttgatgctataggtatgggtgtttccgtccttattaaacaaaaaaggagagtaaacttttaccataccacaaggtataataaaaagctgccactgaatgagtttattttaaaggatgatttaattgaaggcagtgagaaagatacaattaaaaaactaagaaaaccattccgggatgcttatgaaattggtgggctgcatgaacttcctttagatacacgaagaaaagtggatgatctgtttcgccggtttctgtcgcatagggatgccgtggtttatattcgaatccccaaaacgtataaatactggggagtgtatttgcttcaccacaatataagcccgcaggatctgattcaagatgatcaatcgtttatccttatgtgtagccgaaaatcccgtttaaaatagatatttttatagagtgaaagtcgactaatcaacatatgtgggctttcactttttttgtgttgaaatttattcaatagccttatataaagggggctatttttaaatgactattaataatattaaagatgatattaacattgttgaggatattgatcaggatgacatttctttagaagaaatactggcacagtattcaggtgataatgctgcggatgatagtggcattgagcaaaaaacaaacggtgaaggtaatgatggtcacaatgttgatattgaaaataatagtaaagaggacaattctaaaaacgtagcggatgatgaacatcttgatgagtttagtaaaagcgaatctgacataacaaattcgaatggtgcagacagctatatcgaaaaacccatggttaataacccggacaataatgttgataatgaatttaataatgaacttgaatatgaagaggatggtgaaattgatgatgataataaattagatataactgaacgtgcaaaaaggattaaagaagctttggaggagccagaagtcgttaaaacgaatttaactgcaagtttagaggacagtgagggtaaccctattgagccaagaaaacggggaacattggctgtccaagtaattagtattgaaaatgacttaaagcaaacaaaccgggtgcgtgtgggtgaccaggatgtttatgatctgcaggagtcaattaatagatttggtttaattgaacctattcatgtggtgccatttggtgattattatttgctgctgaatggttatcgcaggttggaggcgtgtgtcaaccttggtatacggaagtcccagcgttggtagatgggacaatacccccaacaatggttaagtattatgaggctattttaaataatgtaaagccttatcggttctcagagaaattaaacatggtaagcacatccgagatacacagaaaaacgtttcttatgcagctattgaagggatactggggttaaaggctggagagttcttaaaagctttatatattgatcaaatgaaaaatgattttcctgacgtctataaacaggttgagttgggaagatgactattgagcagggttttaaaaggttgaaaaagaggttgagaaaattgaaaaagaagctgctgcagttgatcaattaaatagtggtgaactagatgaaaagttacgagacaaagatgagttggctgatttgcagattgaaaagcaaa
